United States Patent Application Publication US 2007/0020625 A1 - sequence listing, part 9

SEQ ID NO: 10091 - DNA, 9084 bp, Photorhabdus luminescens
atgaacaagcagttatatcgtattatctttaatcaggcccgccagatgtggatggtggtggccgagatagcgcgggccggacggggaagaaccggacgccgcgctcatcgctccgcttcaccgcagcgttgttgccggctgactgcgctacggtttggggtgttattcgcccttggcggaatttcgcttacggcacaggcggcgattgtggccgacggacaggcaccggggcgtcagcagccgactattattcgcagcgccaacggcacgccgcaggtcaatattcagacgccgggcgccgatggcgtttcccacaatacctaccgtcagtttgacgtggataaacagggagttatcctcaataacagccatcaggctacgcagacgcaactcggcggcatggtggcgggcaatccgtggttagctaaaggggatgcccgcgttatcctcaatgaagtcaacaaccataaccgcagtcacctcaacggctggattgaagtggccgggcataaagccgaggtgattattgccaatccggcgggcatcacctgtaacggttgcgggttcattaactcacatcgcaccacgctcactaccggacaagcgctgatggagcgaggccggctgaaagggtttgatgtcaatcagggggaagtgcggattgacggacacggtatggacagcacacagcaaagttacaccgatattatcgcccgctccgtggcgattaacgccaaattacacgcgcaagacctgaaagtgaccaccgggcgcaatattgtcgatgcgacgcatcagcagatgaagaaaaaatcgattgacgatgaaaagcacccggcgtttgcgttggatgtggcggcgctgggcggcatgtatgcccataaaatcaggctgataggcaccgaagcgggggtgggcgtgcataatgccggtaatatcggcgcgtctgccggcgaggtccatatcaccgccgagggccggatagagaaccgcggcaccctcagtagtcgggatacgttgcaattaacctcgtctgccgatgtcactaacaccggcaaattgctgtcacaatcggcggtgaatttacaggctaaaggtgcgctcaataatcagggccgggtggaagcccgcggcgataccaccgttactgcgggcacgatacacagcagccatgacagcgtatgggctgcggggctggatgataacggcaacactacccgacccggctcattgactctgaccgcgcagcacgttcaggctaagggcaaaaatctggccgccgatacgctggctatccacagtcagcggattgacctgagcgacagccagaccgcagccagccagattcaactcaccgccagtcaattgggcatcagtaccgctcgcgctaccgtcaacgccgaccgtttgaccgcgaaaaccccgggccagtttaacaacgacggcggccagttagtggcgcgagcaatccacctcacgacgcctgatatctctaacttgaagggaaaaattaatcagaccggtactggtgaactgacgctccatacccgcaccctgaataaccgtgaggggaccgtgttcaatcaggggaaattgaccctcaccactgaccggctcgacaaccatcagggcactattgccagtcagggcgaggacctgcatctcaccgcgcatcaggccgataacaaccagggaacggtgcaactggcaggcaacgggaaactgtcgctcaacacgcaacggtggctgggtgataagggcaaactgctgaccaatggcaccctgacgatacaggccggtgaactgcaactcaaccacgccgaaactcaggccgggcagataaccatcaacgccgacaccctgagccatcaaggcggcgtgatgcaacaatggggtaaggatgacttgtccctcactacccggatactggataaccacagcggcactattgcgggcaatggcaacctgaaccttaaggcaacgaccgtcgataatcgtcacggcaatatcgtggccgccgaccaaggttcgctgaaactgaccgtcaaagacacgctggataatcagtcgggcaaactggaagcgggccacgcgctccaacttagcgccactcaactggataatcgccggaggagcattgttgccgccggggacagcgccaccctcaccgttggcaaaactattcaaaacgctcacggccatcttgaagccaaaacccgactgactacgactagccagacgttggataacacccagggggtgttgctggcacaaaacattgacagccagaccacaggccatcccttcaccaataccgccggacaggtgatagccgaagacaccctgacggtcaacagtggtcaactggataatacggcggggctgttacaggccggtcgcgagatggccgttgatacccacgggcatgggctcaccaatacccaccatgccgaccaaaaagcgggccggttattgagtggcgggcagttaactttgcgcaccggcgacatcgacaacaccggagggatgatcgcagcggacggcaaaaccgtgctgaccagcaccgcgctcaataatactcagggccagatagccggaaatagcgggctgaacattcacagccgacaactcaccaaccgcgagggcactttacaatccgccgacgccctgactctggataccgacgggcagttactggataaccagcagggccagattatcggtgagggcaaaaccactatcaccagtggcccgctggacaatcgccacggtcatcttcaaggcggacagttggctatcgatacccgacacgccgcgctggataatcgggatggcaaactgttatccacggacaccttaactctgaacactcaccaactcgataatcgtcacgggcaggtgcaggcggtgggcgacactcagcttgatgttgacactcaaaccgataacaccggcggccttatccgtggcggtcagcaattgaccctgaacaccgctcgcctgattaaccgcgagacggcgcacacggataacgggctggaagcgcaaaacctgacggtaaacgcgcaacaggtggacaatactcagggcgctttacgggcggccaaccacctgcaagcgaacatccgccagacgttgaataatacccagggactggtctccgcaggtaaacaactgacggtgggcgacaagagcgggcctgcctcgctggcgattaacaaccggcaaggcacgctaattgccggggaacacgcagctatcaccgcacacgccttgagcggggacggccaactgttatcgcagggcgatatggcggtcactttaaccgaggattttcaccataccggcaacacggcggccaatggcaatctgacgctgaaaacgaccggcaatatcaccaacaaccgccagataaaagccggtcgggcgctgtatctgggcgcacagaatctcatcaacagcgcctccggtgaaatcagcgccaaacaaacgcaaatccaggttcacgatacgctgaacaacaccggactgattgacggcggcttaacccatctcacggccaacactctgaacaataccggcaccgggcgcatttacggtgaccaaattgccctccagacaggcacactgaataactccgcacaggacggcaaagccgcggtgattgcggcgcgggaccaactggatatcggcaccggaacactcaacaaccagcatcatgcgcagatttacagtgtgggcgacatgcacatcggcggtcagttggataacgccctgaaagctaccggccaagctggtgtgctcaataaccacgcggcgacgattgaagccgggcgccatttgaagattaatgccgaccggattaacaacaccaacgccgggttggtgactcaggtcgtcgaaacagaaaagtctcagcatcacgatgcagtactgagcggccagaccactcgctatgactggtcacaggtggacacctcccaccgcaataaatacaaagtgcacgatgccatcatgccggacggcagcggcagtaatgacttttacgaatatcagtacacccgcaccgtcagggaaactcaggttaaacagagtgaccccggtaaaattctggccggcggcaatatgacgctcaacagtgcgcaggtcaccaatcatgacagccaaattatcgccggtggggcgctggacggggtgataggcgaactgcataatattgccactcagggggaacgcatcactaccgataaaggtcgccagacccactggtatgcgaaaaagaaacgactgaagccccgattccgtggtaccaaaacctcgcagggaaaaagccgcagcaattatgcccccgccccagtgatagaaaccatcgacctgaaaacgctggcctggcaggagcatacccgtccgcagggtaccgatatcacgattacagaccgacaaaccggtcagatacacgcggcccccacgacagtcacaccggtgagcggtatcaaaaatcagccactggtcttgcctcccggtcagccgtttgagctgagtttgcccccggagaccgtcaaagggcaaacagtcgatccggtgatacgcgtggtgacgcccgatacccgcttgccgaataacagcctgtataccgtgcaaccgggcagtgacagtcactatctggtcgaaaccgacccgaaatttacccagtacaaaccgtggctgggctcggactatatgcggcaacagttaacgcatgacccggcgctggtccacaaacgtctgggcgatgggttctacgaacagcggctggtgcgggaccaaatcacccaactgaccggccggcgctatctgccgggctacaataacgacgaagcgcagtttaaagcgctgatggatgccggtgtcgcttttggaaaacagcaacaattaacgccgggcgtcgccttaagcccggcacagatggcgctgctgacctcagacattatctggctgactaaccaaaccgtcactttgccggatggcactaccgaggtggtcaccgtgccgcaggtttatgcgcgcgtccgtcagggcgacctgcgcagtgatggcgctttgctggccgggaataccgtggcgctcaacagtcagggcgatatcaccaacagcggcacaattagcgggcgggatgtgactcaactgacggccaacaacctcaccaacagcggctttattcgcggcggcaaagtagatttaacggcccaacagacgctcaccaaccggggcggccggattcagggggatgaccgggtgaccctgaaaggccgggatatcaccagtgcatcaacggtgcgcggggatgaggctaatcgttggttagatcgtccggcaggcatctatgtgcagaacgataacggcaccttatcgctgaacgccatcaacaatgtgcaattaaccgccagtgacgtcaaaaacgccggtaaagacggccacaccgagataacggcaggccataacctgacgctggacaccttaagcacgcgtcgcacagagcagggcaactgggggaaagataacactcgccatctgacccaacaacaagatatcggtagccagataaccggtgccggtgaggtgaccctgcaagccgggcaggatttgaacgccaccgctgcccacgtcaacgccggtcaacacctgacggcgcaggccggaaataacctgacgctgaccaccgggacggcctcatccgatttagtggagcacagtaaacaaaccagcaaaggctggctgtcgaaatcgtcagtggaaacccacgatgaagtgcacgaccggcaggcgctcagcaccacattcagtggcgataaagtgactttacaggccggtaaagacctcaatatccgcggcagcaatgtggcgggcacgcaggatgtcagcctgaacgccggtcatcagctcaccgtcaccaccgccgcggaatctcacgatgaaacccatttgcggcaggagaaaaaatcgggcctgatggggactggggggattggcttcaccttaggtaaagccagccagaaagtcaccaccgacagtgacagccagctgagcaaaggcagcacggtcggcagcagccagggcaatgtcacccttaacgcaggtgaacagctccgggttcacggcagcgaggtgattgccggtaaagacctgacgctcgccggtcaacaggtcgatatcaccagcgcggaaaaccgccatcacaccacgacaaaaaccgagcaaaaacagagcggcttaactgtggcgctgagtggcacagcaggcggggccgtcaacagcgcggtgcaaacagccagagccgcccacaatgaaagtgacccgcgagtgaaagcgctgcaaaatactaaagccgcgctgagcggggtacaggccgtgcaggctggccgactggcggaagctcagggcagtgacgacaaaggcaataacaatctggccggggtgagcctgtcttacggtcggcaatcctcccgttcagaacagcagcaccgtcagaccacccaacagggcagccacctcaccgccggggataacctcaccataaccgccaaaggggatggcaaaggcgcatcaggccagaatggcgatatccgtattcagggcagtcagttacaggcgggcaaagacctgcaactgaatgctcaccgggatattcagctctcctccagccagaacaccgaacagacgaccggcaagaacagcagtcacggcagcgcgctgggcgtgggcctgaccgcagggccggggggcaccggtctgaacgtctcggccaatgtcagtcggggcaacggtcacgaaaacggcaacggcgtcagtcatactaacaccacgttacaggcgggacagaccgtcgggctgaacagtggccgggacacgacgctaaaaggcgctcaggtcagcggcgaacagattaccgccgaggtgaaacgtcatctgaccctcagcagcgagcaggacagccagcgctatgacagcaaacaacagaatgccagtgcgggcgtcagtgccaccgtgggtcccctcaccaatggtaccgcgagcctcaatgccagccgcaataaactgcacagcaactatgacagcgtgcaggagcagaccgggctgtttgctggcaaaggcggctatcaggttaacgtcggtgaccacacccaactggacggggcggtgatagcgagtcaagccgacaaaaccaaaaacaccctgaacaccgggacgctgggcttcaaggacattcagaatcaagcggactttactgtcgaacagcagagtgcgggcgtcagccttggtcaaccgaccgccggtcaggtcctgaataatctggcggtcaatgggctgacggggactcataactcaggccatgacagcagcaccacgcacgccgcggtcagtgacggcaatctgattatccgggacaaagcgcaccagacgcaggatgtcgcgaacttaagtcgcgataccgataatgccgccaatgttctgagtccgatatttgataaggaaaaagcacagcaacggctgaaacaagcgcaactgattggcgaactcagcgcccagatgaccgagatagcccgtacggaagggaaaattatcgccaccaaagcggcgaaagcgaaactgaatcatatcagtgaaccggacaaagccgcggccagagaaaaattgatcaacgcaggtaataaagacccctctccagcggatatcaataagcaagtttatgacaccgcttacacgcaggcactgaatgactcgggcttggggaccggcggaacctatcagaaagccttacaggctgctacggcagcgattcagggcttggctgggaacaatctcggtcaggcgctggccgggggcgcttcaccgtatctggcgggcgtgataaaagagctgacgacggacccacaaacccatcaggtggataccgccaccaatacgctggcccatgcgattttaggcgcggtagcggcagaggtcagcggcaataatgccttgtcaggcgcagccggtgcggcttccggtgaactggccgctcaggtactgatgaagcaactttatggtgacggggccaacgtcagtgagttaacggaggagcagaagcaaactatcagcaccctttccaccctggcggcagggctggccggcggtattgccggtgactccaccgggagcgccatcaccggggcacaggcagggaagaatgcggttgagaataactatctgagcgtgaatgagctggacagttttgcgcatcaagcccgcacctgtgaaggcgaaagctgcaaacaagtgatcaaggatatggtagacactaatatccgcaatcagcaggaaatgatggatttctgcaacagcaacccgacccagtgtgcacagaagtatggttatctggttgatcagtggccggtgtttgaacgtaccctcaaaaatatggaccgggatggcacattgccggttgagttcagaaattacctgtcggcggtgaatacgttaggtcaggcggccacaggcaaggtaggcgaactcggctggacaaaacgctttgaggcgatgggcatgagtcaggagactgccgctgcaatggcgatgacgctgcctattgtgatggagggagccaaagggccgaagtcgtcaccaaaatcatcgcaaaataatgccggcaaagatgctcagcctgagttagcagggaaaaacacaagtggtgcggaaaatgcggcaacttatccgaagttaaaagaagacttggtgcaacgaaacctcagtcatattgcttcgcaagatccaaggttggcggctgtagttaaaggtgataatggtaagctcaattatggcattggcactggaactcgaacagaagcggatagattaggcaaaatctgggtaggagatggagccaagaagactaccggaaatggctgggttagtgcggatggtacgagaggttataggccgccatcagagaaacctaatagtgcccatgccactactggtgtgcaagccaactttgaaacttattccattgattctaaaggaaaaataaataagactggaaacggtcatttaaatattctggattaa

SEQ ID NO: 10092 - DNA, 348 bp, Photorhabdus luminescens; identical to SEQ ID NO: 5859

SEQ ID NO: 10093 - DNA, 228 bp, Photorhabdus luminescens
atggctaaatgcgattctaaagcaaaaaccattacaactaaagtgcaggctgtaaagccacggcattacaccgtgggctaccggcctaaccggggcaagcccaatccgtacccgcagctcaccattaaggggcgctggttggctgcgttgggctttaccacagggaagccgatcactattaccagcgaagccgggcagttaatcattcaactggctgagaatgactga

SEQ ID NO: 10094 - DNA, 396 bp, Photorhabdus luminescens
gtgatatcaagttcaacaacctggtttctcgatatgcagttccctgaacggcttaccacattacgcaaggaacgcgggctcactcagcaggcgctggctgatatggctggtgtggcagttttacagatccggcgttatgagggaggctcagcacaacctaccttagaggtaatacgtcgcttggctatttcgctcggtgtcagtgcggatatgctggtttttgatgaacaggagcgcggtcctagtgagcggctgcgctatcaatttgaggcaatttctcgtatgccgcagtatgagcaggaggttattaaggagttgctggatgcaatgatcatcaaaactcagattgccggcacaatggcctgtatttcaacaacagcgaaggaagagagttaa

SEQ ID NO: 10095 - DNA, 3318 bp, Photorhabdus luminescens
atgacccgcgttcccgacaccgatttagtccacttaaagcaaaccgtctcgttactggggctggcgcgtaagcaaggccgtccgatgaaaaaacgcggtgaggattatgtgctgcgctgtccgttccataacgagaaaacgccctcaatggtgatatcgccggctaagaacctgtatcactgctttggctgtggcgcagcggggtcggtgctggactgggtgatacaaacggaaggggtgacgctgaaaatcgctatccgccggctgcgggagctggccgggttgccggacatggacaatgcagttgtggccgcttcttctttagccgccccgccggagtcacaggcggcccccctgccgcgcccgaaactggccgacctggacgatgacgggcaggcgctgttgcatcaggtgattgatttttatcatcagcacttactggcatcaccggaagccaaagcctggctggcacgacgcgggctgaatcatcctgaactggtcagccacttccggctcggttatgcgggtcatcacggtatcagcggttccgcgggattgttgccgtccaaagacagtcaggaaggtcagcagttgcgcggcaagctgtcggggctgggcgtgttgcgtaccaccacccggcaggaccacttccggggctgcgtcgtggtgccgataatcggctgggccgaatcgaccagtgtggccagccgcgggcgggtgctgcaactgtatggtcgccgaacccagccggattacaaagtcctgaaagacagcccgaagcatctgtacctgtcctcaccgctagccggggtctggaatgaggcagcgatgaaagccgctgcggaaattatcctgtgcgaagcgctgatcgatgctatgaccttctggtgtgccgggttccgcaacgtgatcgccgcgttcggggtgaacgggtttaaccgtgagcatctcgaagccttgcagtatcacggcgtgaagcgggtgctgattgcctttgaccgggacgaggccggagaccgtggcgcggctaatgtagccgctgatttactggaagccggtatcgaggcgtggcgggtgcagttcccgccaggtatggatgccaatgactatgcgctgaaaagcggcaatgccgaacatgcgctggggctggccttgcaacaggcggtctggctgggacagggaacagcgccgggcgcggtgttcagccatgagcggcccgtctcgccgagtgtgacggaaaagccccaaagtgccggggtggctaaatcttcttctttagccgccccgccggcgctgaccgttgcccccgtgccctgtgagcgcacggcgtccggtgagttgttgatgaaaagcggcccccgggtctggcggatacgggggatgaaaaaatccccggtaccggacgtgatgaaagtcaatgtgcaggtgcgggatgaaacgtccggcctgttccatgtggatacgctggacatgtatcacgcgcggcatcgtcagaactacatcagcacggcggcgcaagagctggaatgcgagctgtcggtcatcaaacgcgaagccgggcgggtcttgctgatgctggagcagcaacaggacgcgcaacagcaagccgacgccgaagcctcagggacaacggcggtcacggtcagcgcggaagacgaagccgccgcgctggcgttgctgacatcgccgaacctgacagaacagattatcaacgacatggccgcctgtggcgtggtcggcgaatccaccaatctgctgaccgggtatctggcggcagtctcgcgcaaactcgataaaccgctggccgtgctgatacaaagcagttccgctgccgggaaatcgtcattgatggaggcggtgctgaacctgatgccggaagaggagcgtatccagtactcggcaatgaccgggcagagcctctactatctgggggaaaccagcctgcaacacaagatactggcgatagccgaagaagaaggcgtgcggcaggcggcttatgccctgaaactgttgcagtccgacggcgagctgaaaatcgccagcaccggcaagaacgaacagagcggcgaactggtgacgcgggaatacaaggtacagggcccggtgatgctgatgctgaccaccaccgccattgatgtggatgaagagctgctgaaccgctgtctggtgctgacggtcaacgaatcgcgcgagcagacgcaggccatccacgccatgcagcggcaccgccagacgctggccgggttgctggctgactcggaaaaaggctatctgacgcagttacaccagaacgcccagagcctgttaaggccgctgaaagtggtcaatccttacgcccatcaactgacgttcctgtcagacaaaacccggatgcggcgcgaccacatgaaatacctgacgctgatacaggccattgccctgctgcaccagtatcaacgtgaagtgaagaaaacgacccaccgcgggcaggtcatcgaatatatcgaagtcacccaggacgacattgccctcgccaaccggctggcgcatgaggtgctggggcgcacgctggatgaaatgccgccgcagacgcgcaagctgttgctgctgatacaggactgggtacgggaaaccgccggacaacaggcggtcagggtcgatgaactgcattttacccggcgggatattcggaccgctttgcactggggtgatacgcaactgaaagtacatctggcgcggttgctggaaatggaatacctgttgctgcatcgccgcgggctgacctatgaatatacgctgttgtgggatggtgaagataccgggcaaccgcatctgtgcgggttactggagatgactgaatcccggtcagaaacggcaggcaatgtgtttcagtcggggtcagaggatgttcagtcgggcacgggtcggggcagggtcggcagtcagtcggtaaatcagaatccggcctcaaggcaggcaacatcagacctgtcggcggaagtggccggggtaaagcaaaaagcagttattaagacagaaaaaaaaccggcttcaatccccctgcccgaagaaacagaaatgacgaatgacgctgttgcgggcaaggcgttccggtcggggtcagagggtgttcagtcgggtacaggtcggccccaggtcggtacacagccggacagacaaaatccggcctcagcacagacagcacaaggtttaacaacagaaccgggcggggccggaaagaaaacggttaacagacataaaacgcaaaaggccccaccgcccgctgcctcagccgcccatccccaatccgaaacggaggttaatcatggcaaaccgtaa

SEQ ID NO: 10096 - DNA, 1131 bp, Photorhabdus luminescens
atggcaaaccgtaaaccccgcaaggggagtcttctgaccgttaatgacgtctaccgtcagcctgtggggccggcgcatgacccgaaaagcctgtatgcactgctgctgcgcttcgtggcctggcggcaggaacggaactggtcggaaaccacgctgaaagtgcagacccatcacacctatcactttatcctgtgggccacggaccggggcctgtactatgccgcggacatcacgcggccgatactggagcgttaccagcgctacctgtaccagtaccgaaagaccaacggagagccgctgagcatccgcacccagcgcacgcagttgcagccgttacaggtgtggttcaaatggctgacgaaacagaacctgatactggcgaacccggcagcggacattgagttgccgcgggaagaaaaacgcctgccgcggtatatcctgagcattgatgaaatcgagcatatcctgtcgctgcctgacccgaatacgttgcagggcgcgcgcgaccgggccctgatggagctgctctggtcaacggggatacgacgcagtgaagcggcccggctcgatatctacagcattgacgggtcacgcaaaacggtgaccatccggcagggcaaggggaataaagaccgggtattgcccctcggcgaacgggccttaaactggctccagttctatcagcaacaggttcgcccgcaactgctggtcaccccggacatccagtcgctgttcgtggcaatggacggtctcgacgggttgcagccgaacggtatcacgaatgccgtaagcggttatatccgggccgccggcattgagaaaaaaggtgcctgccacctgttccggcatgcgatggcaacgcagatgctggagaacggcgcggacctgcgctggatacaggccatgttaggccatgccagcgtggagtcaacccaggtgtatacgcaggtctctatccgggccttgcaggcggtgcacgccagcacccatccggcggagcaaatggccgacgaaaaagtccgcgacgccgatgaggtgggtttactggccgacctgtacgccgacgataacgccgacacggacacgccgccggacagttcagagccgacctcaaccgccgatagccgctga

SEQ ID NO: 10097 - DNA, 132 bp, Photorhabdus luminescens; identical to SEQ ID NO: 7729

SEQ ID NO: 10098 - DNA, 195 bp, Photorhabdus luminescens
ttgatttggagatctgatcaagagacaggggctgcacggggcggcgatggcgagcacgggaatgagcaaggagcctgcgactgcgaaccgggcgcagccagtgcagcggggttggggcggggggaagtcaatgagcggaggccgcaggccgatctgccttcagggttgttggccggacgttggcacggcagctaa

SEQ ID NO: 10099 - DNA, 1383 bp, Photorhabdus luminescens; identical to SEQ ID NO: 7510

SEQ ID NO: 10100 - DNA, 444 bp, Photorhabdus luminescens
atgtttagcgccttcggcaccaaacagacttcccatgctaagggcattattatccgcaacaacccattccattgcgaagttgaccgccaaacaccgattttcccaatgccctcagccagttaccacccgttttttccaatgggcgttcaccgccggacccaaaaccccctgacgcgcttttcgcccccgaaggccggtttttcccgccgcactctggtcagtgtagcgccttcttcggcaacgggcgaacgtcgcccaactcgcttgggcggcgggtgcccgttctgcgggcgcgggcggcacagagcccgcaagcggcgcccctgcgacgctctgaggcactgtggcttcggtttgcgtatgaccttgcatgaccacgcggttttgttttgttcagggaagcccccgggggctgcacctgtctttcctacacaaatattttaa

SEQ ID NO: 10101 - DNA, 1008 bp, Photorhabdus luminescens
ttggcggtcaacttcgcaatggaatgggttgttgcggataataatgcccttagcatgggaagtctgtttggtgccgaaggcgctaaacattttgaaggtgcgggttcactggctcaaaaaatggcccaatctggggcaacatccgaagaaatcaacgcagccttaactcactatctaaaagggcaagtccctgatggtcaggacccagcaaaaggtttgattattgcgtggggtaatttctttggtgttccgttggatgtcgtgttatcaaatgagcagatgacgccacagaaagcggcggaaattgttgccggagggatacctaccagtgaagcaaagctgatacagtttgcagccgcgaaagcatatctgtctttgagtaaatatcaatcgatagaagctgttgatagaaaaaatagttcaacgattgataatttgatgaaagaaaaagcacagacagcgaaaattggagaaatagcccttggtgctgataaaaacatctcgcatacaaatgttaattccaaagcttcactaggaacgaaaatagataagagtatagttatagtagataaggaacatttacctacaagtgtgtcctcgacatttaaggctggaaaatatgaaactgttattacacaagaacctgtaacattatttagaaaatttggtggtgttaatgatcaagccaaattagatggtggttacgcaacaaccacacaaaatgcgggcagaaacgaaactgccgtctataaaaactggagtacaactcgatttgaggctgagatagaagtacccaaaaatactaagctaaacattggttctgttggggaacaaccacctttgagtaataatcctaaatacataggtggagctgatcaaattctactgccacggaattatcctatggattggattaaatcaatacgagatggaaaaacaggtaatgtttacacttacgaagaatttaagaaaacatttccagatcaaataacaaataaaggaaaataa

SEQ ID NO: 10102 - DNA, 309 bp, Photorhabdus luminescens
ctgtgcacactgggtcgggttgctgttgcagaaatccatcatttcctgctgattgcggatattagtgtctaccatatccttgatcacttgtttgcagctttcgccttcacaggtgcgggcttgatgcgcaaaactgtccagctcattcacgctcagatagttattctcaataacaacgcattatcacttagtgaacaatgggttgttgcttataattgcgtaaatttcatctgttattgggtctatatcttccccatattggcctctatcccccatcattctgaaatcattcataatatatttgtataa

SEQ ID NO: 10103 - DNA, 813 bp, Photorhabdus luminescens; identical to SEQ ID NO: 7505

SEQ ID NO: 10104 - DNA, 318 bp, Photorhabdus luminescens; identical to SEQ ID NO: 7506

SEQ ID NO: 10105 - DNA, 243 bp, Photorhabdus luminescens; identical to SEQ ID NO: 7507

SEQ ID NO: 10106 - DNA, 372 bp, Photorhabdus luminescens; identical to SEQ ID NO: 7508

SEQ ID NO: 10107 - DNA, 3315 bp, Photorhabdus luminescens
atgacccgcgttcccgataccgatttagcccgcttaaagcaaaccgtctcgttactggggctggcgcgtaagcaaggccgtccgatgaaaaaacgcggtgaggattatgtgctgcgctgtccgttccataacgagaaaacgccctcaatggtgatatcgcctgctaagaacctgtatcactgctttggctgtggcgcagcggggtcggtgctggactgggtgatacaaacggaaggggtgacgctgaaaatcgctatccgccggctgcgggagctggccgggttgccggatatggacaatgcagttgtggctgcttcttctttagccgccctgccggagtcacaggcggcccccctgccgcgcccgaaactggccgacctggacgatgacgggcaggcgctgttgcatcaggtgattgatttttatcatcagcacttactggcgtcaccggaagccaaagcctggctggcacgacgcgggctgaatcaccctgaactggtcaatcactttaagctggggtacgcgggccatcacgggatcggcggttcagcgggcttattaccgtccaagagcagtcaggaaggccagcacctgcgcgacaagctgtcggggctgggcgtgttgcgtaccaccacccggcaggaccacttccggggctgcgtcgtggtgccggtgatcggctgggccgaatcggccagtgtggccagccgcgggcgggtgctgcaactgtatggccgccgaacccagccggattacaaagtgctgaaagacagcccgaagcatctgtatctgccgtcaccgctagccggggtctggaatgaggcagcgatgaaagccgctgcggaaattatcctgtgcgaagcgttgatcgatgccatgacgttctggtgtgccgggttccgtaacgtgattgccgcgttcggggtgaacgggtttaaccgtgaacatctcgacgcgttgcagtatcacggcgtgaaacgggtgctgattgcctttgaccgggacgaggccggagaccgtggcgtggctaatgtggcggctgatttactggaagccggtatcgaggcatggcgggtgcagttcccgccgggtatggatgccaatgactatgccgtcaaaagcggcaacgccgaacatgcactggggctggcgttgcaacaggcggtctggctgggacagggaaccgcgccgggcgcggtgttcagccatgagcggcccgtctcgccgggtgtgacggaaaagcctcacaatgccgatgtggctaaaccggctgccttagccgccccaccagagctgactgttgcccccgtgccctgtgagcgcacggcctgcggtgaactgctgatgaaaagcgggccacgtatctggcggatacgggggatgaaaaaatcgccggtgcctgatgtgatgaaagtcaatgtgcaggtgcgggatgaaacgtccggcctgttccatgtggatacgctggacatgtatcacgcgcggcatcgtcagaactacatcagcacggcggcgcaagagctggaatgcgagctgtcggtcatcaaacgcgaagccgggcgggtcttgctgatgctggagcagcaacaggacgcgcaacagcaagccgacgccgaagcctcagggacaacggcggtgacggtcagcgcggaagacgaagccgccgcgctggcgttgctgacatcgccgaacctgacagaacagattatcaacgacatggccgcctgtggggtggtcggcgaatccaccaatctgctgaccgggtatctggcggcagtctcgcgcaaactcgataaaccgctggccgtgttaatccagagcagcagcgcggcaggcaagagcagcctgatggatgccgtgctgaacctgatgccggaagaggagcgtatccagtactcggcgatgaccggacagagcctgtattacctcggcgaaaccagcctgcaacacaaaatactggcgatagccgaagaagaaggggtgcggcaggcggcctatgccctgaaactgttgcagtccgacggcgagctgaaaatcgccagcaccggcaagaacgagcagagcggcgaactggtgacgcgggaatacagggtacagggaccggtgatgctgatgttaacgacgacggccattgatgtggatgaagagctgctgaaccgctgtctggtgctgacggtcaacgaatcgcgtgagcagacgcaggctatccacgccatgcagcggcaccgccagacgctggccgggttgctggctgactcggagaaaggctatctgacgcagttacaccagaacgcccagcgcctgttaaggccgctgaaagtggtcaatccttacgcccatcaactgacgttcctgtcagacaaaacccggatgcggcgcgaccacatgaaatacctgacgctgatacaggccattgccctgctgcaccagtatcaacgtgaagtgaagaaaaccacccaccgcgggcaggtcatcgaatatatcgaagtcacccaggacgacattgccctggctaaccggctggcgcatgaggtgctggggcgcacgctggatgaaatgccgccgcagacgcgcaagctgttactgctgatacaagagatggtgaacgcacaggcgcaaatccagcactgccagccaaatgaagtccgctttacccggcgggatatccgcgcctttacccactggagcgacagccagctcaaaaaccactgtcaacggctgacggaaatggaatacctgctgttgcatggcggcagccgggggcacctgctgcattatgaactgctgtgggacggagaagacaacggcgcagcccacctgtgcggcctgctggatgtcggagaagcggactcagaaaccgccggcagtgaacgcaagtctgacccggaaggtcataagtcttccccaagtccggggcaagtctggcctgagtctggggaagaaaaacccgcgtcagcccagacagcacaagggccagtgggggcacaagtccgggcagatgaaaacgcagttatcaaggaaaataatcacagagacgcattgcccgtacccgacagggataaaacgccggcagccgtcccgacaggtcatgagagcaagtctgacttaaatgaacacccgtctgcctcaagtctgggccaggtccgggctaagtctggggtgaaaaaatccctatccgggcaggcagaacacgggttcagcgtaccgcaagtcggggtaacggaagacaccgtgataaaaggaaaaaagaaaacgcgccccttgtctgcgcccgcccctcaatctcaaccggaggtcaatcatggcaaaccgtaa

SEQ ID NO: 10108 - DNA, 1131 bp, Photorhabdus luminescens
atggcaaaccgtaaaccccgcaaggggagccttctgaccgttaatgacgtctaccgtcagcctgtggggccggcgcatgacccgaagagcctgtatgcgttgttgctgcgctttgtagtgtggcgacaggaacggagctggtcagaaagtacgctgaaagtacagacgcaccatacttaccactttatcctgtgggcaaccgagcgcggcttatactacgcagcggatatcacccggccgatactggagcgttaccagcgttatctgtatcagtaccgcaagaccaacggtgaaccgttaagcacccggacgcaacgtacccaactggagccattgaaagtctggttcaaatggctgaccaaacagaatctgatactggcgaacccggcggcggacattgaactccccagactggaaaagcacctgccgcgctatatcctgaccatcgatgaaaccgaacagatactggcgcagcctgacctgacgacgttgcaggggatacgtgaccgggcgttgatggagttgctctggtcaaccgggatgcgtcggggcgaattaacccggctggatgtgtacagcgttgacggaaaacgcaaaacggtgaccatccggcagggcaaggggaataaagaccgggtgttgcccctcggtgaacgggccttaagctggctacagcgctatcagcaacaggtgcggccacaacttatcgtcaatccagacgtcaaggcattattcgtcgcaatggatgggctggacggcttacaggctaacggtatcagcaatctggtgacagcttatatcaacgcggtgggtatcgagaaaaaaggtgcctgccacctgtttcggcacgcgatggcgacgcagatgctggagaacggcgcggacctgcgctggatacaggccatgttaggccatgccagcgtggaatccacccaggtgtatacgcaggtctctatccgggccttgcaggcggtgcacgccagtacgcatccggcggagcaaatggccgacgaaaaagtccgcgacgccgatgaggtgggtttactggccgacctgtacgccgacgataacgccgacacggacacgccgccggacagttcagagccgacctcaaccgccgatagccgctga

SEQ ID NO: 10109 - DNA, 102 bp, Photorhabdus luminescens
ttggcacggcagctaaagaagaacacgggtttttgccgaggactggctcagccgctgatagcagaaggcgtcagccttgtgcgccacacctgccaatgctga

SEQ ID NO: 10110 - DNA, 714 bp, Photorhabdus luminescens
ctgatcaaccagataaccatacttctgtgcacactgggtcgggttgctgttgcagaaatccatcatttcctgctgattgcggatattagtgtctaccatatccttgatcacttgtttgcagctttcgccttcacaggtgcgggcttgatgcgcaaaactgtccagctcattcacgctcagatagttattctcaataacaacccattccattgcgaagttgaccgccaaacaccgattttcccaatgccctcagccagttaccacccgttttttccaatgggcgttcaccgccggacccaaaaccccctgacgcgcttttcgcccccgaaggccggtttttcccgccgcactctggtcagtgtagcgccttcttcggcaacgggcgaacgtcgcccaactcgcttgggcggcgggtgcccgttctgcgggcgcgggcggcacagagcccgcaagcggcgcccctgcgacgctctgaggcactgtggcttcggtttgcgtatgaccttgcatgaccacgcggttttgttttgttcagggaagcccccgggggctgcacggggcggcgatggcgagcacgggaatgagcaaggagcctgcgactgcgaaccgggcgcagccagtgcagcggggttggggcggggggaagtcaatgagcggaggccgcaggccgatctgccttcagggttgttggccggacgttggcacggcagctaa

SEQ ID NO: 10111 - DNA, 813 bp, Photorhabdus luminescens; identical to SEQ ID NO: 7505

SEQ ID NO: 10112 - DNA, 318 bp, Photorhabdus luminescens; identical to SEQ ID NO: 7506

SEQ ID NO: 10113 - DNA, 243 bp, Photorhabdus luminescens; identical to SEQ ID NO: 7507

SEQ ID NO: 10114 - DNA, 372 bp, Photorhabdus luminescens; identical to SEQ ID NO: 7508

SEQ ID NO: 10115 - DNA, 3315 bp, Photorhabdus luminescens; identical to SEQ ID NO: 7738

SEQ ID NO: 10116 - DNA, 1113 bp, Photorhabdus luminescens; identical to SEQ ID NO: 7739

SEQ ID NO: 10117 - DNA, 102 bp, Photorhabdus luminescens
ttggcacggcagctaaagaagaacacgggtttttgccgaggactggctcagccgctgacagcagaaggcgtcagccttgtgcgccacacctgccaatgctga

SEQ ID NO: 10118 - DNA, 438 bp, Photorhabdus luminescens
atgtgcgttcaccgccggacccaaaaccccctgacgcgcttttcgcttccgaaggccggtttttcccgccgcgctctggtcagtgtagcgcctttttcggcaacgggcgaacgtcgcccaactcgcttgggcggcggacgcccgttctgcgggcgcgggcggcagagagcccgcaagcggcgcccctgcgacgctctgaggcactgtggcttcggtttgcgtatgaccttgcatgaccacgcggttttgttttgttcagggaagcccccgggggctgcacggggcggcgatggcgagcacgggaatgagcaaggagcctgcgactgcgaaccgggcgcagccagtgcagcggggttggggcggggggaagtcaatgagcggaggccgcaggccgacctgccttcagggttgttggccggacgttggcacggcagctaa

SEQ ID NO: 10119 - DNA, 270 bp, Photorhabdus luminescens
ttggggtgcaggtgcttctgttgtgggaggcactatagtgcaatagatacactgatagcggtaggaacaggcgcattaactcaaggtaaaggaacactatttagcacccttgttaatacaggaggcacttatttaggaagtaaagttaaaggggaagatcctacaacctcaatgttaggtaaagcagttagtactgtaattggtaataaagtggttgtgtcgtttctttatagatggaatctttcttttttcacttggagatgtaaataa

SEQ ID NO: 10120 - DNA, 585 bp, Photorhabdus luminescens
atgaaatcagctagcattccaatttatttacaacaagccatcatgaatactttgcggcaaaaactgcaacaagcaaacttatatctcaaccgtgattttcctgaacctacaataaactatcgccaacggggaactaccgcaggcagtgcctatataaaaaattgggaaatccgtcttaatccagtgttactgattgaaaaccaacaagcttttattgatgaagttgtgccacatgaattagctcatctattagtttatcgctactttgggaaagtgcctccacatgggaaacagtggcgttggatgatggaagaagtactgaacgttccagctaaccgtacacacaaatttaaaatcgattcagtacgtagtcaaacttttacttattactgtaattgccagcaacatgaactaaccctacgacgccataataaaattctgcgaggagaaagtcattatatctgccaaaaatgcggagaaaaacttattgctaaatcaatagattctctcaatcctaatttatacccaatggatttcaagatgcatcgcggcggaaagggagtgaatccccgggagcataggtaa

SEQ ID NO: 10121 - DNA, 1173 bp, Photorhabdus luminescens
atgaccacataccttttcacttccgagtctgtttccgaagggcatcctgataaaattgcagaccaaatatctgatgccgttcttgatgctattctagaacaagatccaaaagcacgagttgcctgcgaaacctatgttaaaaccggcatggtcatggttggtggtgaaattactaccagcgcttgggttgatattgaagaaattacgcgacaaacagttcgagagattggttatgttaattctgaaatgggttttgatgcaaactcatgtgcagtattaagtgccattggtaaacagtcaccggatattaatcaaggtgttgaccgtgaagatcccctgcaacaaggtgctggtgaccaagggctaatgtttggttatgcaaccaacgaaactgacgtactcatgcctgcgcctatcacctatgcgcaccgtttggttcagcgtcaagctgaagttcggaaaaatggtgtactgccgtggttacgccctgatgctaaaagccaagtcactttccaatacaataacgacaaaattgtcggcgttgacgcggttgtactttccacacagcatgctgaaaatattagtcagaaagatctgcaagaagcggtcatggaagagatcatcaagccggtactgcctgctgaatggttaaatccaacaaccaaatatttcattaacccaaccggtcgttttgtcattggtggcccgatgggtgactgtggtctgactggtcgtaaaattatcgtagatacttacggtggcatggcacgtcatggtggcggagcattctccggtaaagatccatccaaagttgaccgttcagcggcttatgctgcacgctatgtagcaaaaaatattgttgctgctggtctggctgatcgttgtgaaattcaagtgtcttatgctatcggcgttgcagaacccacttccatcatggtggaaacattcggcactgaaaaagtttcaacagcaactctgactctactggtacgtgaattctttgatttacgccctcatggtttgattcagatgctggatctattgcacccaatctatcgtgatactgccgcttatggtcattttggtcgaccacagttcccgtgggaagccactgataaagcagaagcgctgcgtgatgctgcgggtttgaaactatcagcgatgaatatgtaa

SEQ ID NO: 10122 - DNA, 213 bp, Photorhabdus luminescens
atgagtcatgtgtggggtgaatggggtaatgaaccattatctgctgattgcttatggccaacagccacacttgtcgtcggatgtatccgcgtctttttcctttcttttcaatatgtctttaattcgatgttatctgttgtcagcaaacaggccggatatgtcggacaggcgtattgtcactcggtaattttgtcgttgtttagtagtaactaa

SEQ ID NO: 10123 - DNA, 1905 bp, Photorhabdus luminescens
atgaatgataatatcgctcgtaaaatgcaacagacttacaatattgcatattggggagggagttactactacgtcaatgatcttggcaatgttagtgtgtgtccaaatcctgatttgccgggggcaaaaattgatcttgcggaattggtgaaaagagttcagcaggagcagaaacatttgcgtttgccggcgctattttgtttccctcaaatcctgcaacatcgtttgcgttcaatcaatgccgcatttaaacgtgccagagagtcatatggttataaaggcgattactttttagtttatcccattaaagttaaccaacaacgccgcgttattgaatcactggccagttccggtgaacctttagggcttgaggctggctccaaagcggaattaatggcagttctggcccatgcgggtatgactcgtaccgtcatcgtgtgtaatggatataaagatcgtgaatatattcgtctggcgctaataggtgagaagttaggtcacaaggtttatttggtgatcgaaaagatgtctgagattgcccaagtattggaagaagctgaacgattgaatgtgatcccgcgcttgggagtccgcgcacgtttggcatctcagggttcaggtaaatggcaagccagtggcggtgaaaaatcgaagtttgggctggcggcaactcaggtattgcaattggttgagactttgcgtgctgtggatcgacttgatagtctgcaattgttgcattttcaccttggctcacagttggcgaatatccgtgatatcgcaacaggtgtccgtgagtcagcgcgtttttatgtcgagttacataaactcggggtaaatattcaatgttttgatgttggtggtggactgggggtcgattatgaagggacccgctctcaatctgattgttctgtgaactatgggttgaatgaatatgccaacaatgtcatctggggtattggtgatgcttgtgatgagcatggtttaccccatccgactgttatcacggaatccggtcgtgccctgaccgctcaccatactgtcttggtctccaatgttatcggagttgagcgtaatgaatttacgcagacgacaccaccggcagaggatgcttcccgcccactcaccagtttgtgggaaacatggcaggagatgcactctgaaggaaatagacgctctttacgtgaatcgctgcatgatggtcaactcgatctacatgatgttcatacacaatatgctcatggcatgctggatttgacagaacgggcatgggcggaagagttatatctgaatatctgtcgccgtattcaacaggatcttgatccaagtaaccgtgctcaccggccaattattgatgagctgcaagagcgtatggcagataaattctatgtgaatttctcactgttccagtctctgcctgatgcatggggtatcgatcagttatttcctgttttacccattgagggactggataagccgttggatcgccgtgcggtattgttagatatcacctgtgactctgatggtattgttgatcattatgtggatggtgatggtgtagccgcgacaatgccgatgcccgcttatgatcctgattgtccgccaatgattggtttctttatggtgggagcatatcaggaaattcttggcaatatgcataacctgtttggcgatacagcggctattgatgtttatgtattcgataatggcgaagtgacctataaccaaagtgaagagggggattcagtcgcggatatgctgcaatatgtgaaactggaccctaatgtactgatggctcgcttccgtgatcaagtaaaaggcgcggatttggatacgggtttgcaagagcaatttttactggaatttgaaagtggtctttatggctacacatatctggaagatgaataa

SEQ ID NO: 10124 - DNA, 924 bp, Photorhabdus luminescens
atgacaataagtaccttgggcaaccaacaagatgactctctggtttctaatgccttcggtttcctgcgctttccgctgaatttccagccatattccagcgatgcagagtgggtaattactggcgtaccatttgacatggcaacgtcaggccgtgcaggtagtcgccacgggcctgcggctattcgtcaggtttctactaacttggcatgggaaagccgccgttggccgtgggattttaagctacataattgtctcaaagttgtagattgtggtgatgtggtcttcaattttggtgatgctcaggatatgagtgataaattacaagctcatgctgaaaaagtgttggcttccggtaagcgtatgctctcttttgggggtgaccattttattactttgcctttgttgcgcgctcatgccaaacatttcggcaaaatggctctggttcattttgatgctcatgctgatacctatccaaacggtagccaatttgatcacggtactatgttctatcacgcgccaaatgaagggttgatcgacccgcatcattctgtacaaattggtattcgtactgaacatggacgggacaatggttttacggtgctggatgctgatcaggttaatgaccgtagtgtggatgatttgcttgctcagataaaagagacggttggcgatatgccggtttacctgactttcgatatcgattgtcttgatcccgcttttgcgccgggtacgggtacgcccgtcattggtggtttgacaaccgatcgggcactgaaattgctgcgtggtttgcaaccgctaaatattgtcggtatggatgtggtggaagttgctccagcttatgatcagtctgaaattacggctttggcaggtgcaactattgcactagagatgctttatttacaggcgtctaagaagcgttaa

SEQ ID NO: 10125 - DNA, 714 bp, Photorhabdus luminescens
atgttagaatggattgttgatccccacgcctggatggcacttgccaccctgacaattctagaaatcgttttagggattgataacattatctttttgtcacttgttgtggcaaaactccctaaccatcaacaaaacaaagcacgtaagatcggactaatgggtgcaatgctaatgcgcttggcgctgttagcatctattgcctgggttattcggctgacctccccgatattgacagtttttgagcatgatatttctgcccgtgacttaatcctattctttggcggtctgttcctgatctggaaagccagcaaagaaatccacgaagcgatagaaggtgacaatgaaggagagctaaaacgccctgttcactcctttctgggggccatcatccagattatgttgctggacattattttcagtctggattcagtcatcaccgcagttggtctgtccgatcatctattcattatgatggcagccgttatcatagccgtcggtgttatgatgctcgccgctcgtcctatcggtgaattcgttgaccgtcacccttccgtcaaaatgctagcgctgtcattcttaatccttgtaggctttacccttattctggaaagtgtacaagtgcatatacctaaaggttacatctattttgctatgttcttctcaatggcagtagaaacgctgaatctcatgcgtgggaaaaagaaaagaaattag

SEQ ID NO: 10126 - DNA, 687 bp, Photorhabdus luminescens
atgaacactcttttttcccctccatcgccaccagacaacgaacaacaactgtttgaatgcgcccagcttctggctggcttatcaatgggagaactcgcggcaaaagcaaatttacctatcccacccaatctgaaacgagataaaggctgggtaggcatgttgctagaatattacctcggtgcaagtgccggcagtaagccagagcaagatttcgaacatatcggtattgagcttaaaaccatcccggtagacagaagaggttatccactggagacaacatttgtctgcgttgcaccattaacagggaacagtggtattacctggggaagctgtcatgttagacgcaaattatcgcgggtgctgtggatacctgttgaaggtgaacgggaaattcctctagccaaacgccgggttggctctcctttattgtggagtcccaatcaagaagaagaagagttactacgtcgcgactgggaagaattgatggatttcatcgtgcttggcaaagtagagagcgttaccgcccgtcatggcgaagtattacagttgcgcccaaaagcggctaacagcaaagcattaaccgaagcaatcggcgtacacggccagcctattatgactctgcctcgcgggttctatctaaggaaaaatttcactgctcccctactggctcgtcattttttgatttaa

SEQ ID NO: 10127 - DNA, 1662 bp, Photorhabdus luminescens
atgcccagttcacgcttacaacaacaattcattcgattatggcaacaccatcaaggaaaagaggctgaaaccacgttacaagaactggcaaatgtactgcattgttcaaaacgccatatccgttcactgctcaacaatatgcagaaagcgggctggttacagtggcaggctgagtctggtcgagggaaacgttctcaactgaatttcttacgtgatggatgggaacttcaacaacaacgagcggaagagttgcttgagcaacataacgttgagaagttggtccaactggttggtgataaagatacagtccgccatatggtactatcccagattgaacgccgtttccgtcagggaaaaaacttactgcggatactctattatcgccccttccctaatcttctacccggttcacctttacgccgttctgaaattcatctggtcaggcagatatttaatagcctaacccgaataaatgaggaaaatggggaaccagaagctgacttagctcatcattggcaacaattatcctcaaatcattggcgcttttatctacgcccggctatccattttcaccacggcagagaattacagatggcggatgtcatcgcttcgctacaaagattacgcaacctgccccttttttctcatattgaaaaagtcaccacgcccaccccctatgtgattgatatttttctttcagaacctgatctctggctctctttattaatcggcagcccacatgccatgatcttgcctcaagagtggcaaaagttaccgaacttctctcgtatgccagtgggaaccggcccttaccaggtcataaaaaacagcgctcagaaactacaaattcgtgcctttgataattactttggctttcgggcactgattgatcaggtgaatatatggtttctaccagaactcgccgagaaactggtttgtacaactctgcatctggaaagtgacagcacggataataactcgctagatagcaggatagaagaaggctgttatttcctattacatgaccatcgttcaactaaatgtaagagagaagacgttcgccaatggctatgcagcctgctaacaccgatcaatctgctagcgcattgtgaccccttttatcaacgccattggtcacctgcttatggtttattactacgctggcatcacagtaagctcatatccgaattgaacaaaccagaggatattacccatctgaccgtcacgctttgtcatcaacatcacgaataccacacaatcagccagatccttcaagccatactgaccaaatgcggcgtcgaattgaaaatcaacatcgtggattatgacacatggttcaatggtaacaccgaaagtgacttctggcttgctaccgccaacttttataatcctctggagttttcgctgttcgctacgctgtacgagatgccattattgaaaaaatgccttggtaatgacttaagtaaagaagtatcacaatggcgacgacaagagttatcgcttgaagagtggtgcgaaaaaatagttgatgaacattggctgcatccactgttccaccactggcttgagttacagggacaaagaagtatgcggggagtcaaaatgaacacctttggttggtttgatttcaaatctgcctggttcaacccatatgaagggtaa

SEQ ID NO: 10128 - DNA, 606 bp, Photorhabdus luminescens
atgatggaaaagtttattcaacataccggcttggttgcccctttagatgctgcaaacgtcgatactgatgccattattcctaagcaattcttacagaaagttactcgtacaggatttggtcagcatctgtttcatgactggcgttttcttgatgatgcaggacaaaaacctaatcctgaattcgtattaaatcagccttgttatcaaggtgctagtatccttctggctcgtgaaaactttggttgcggctcctctcgtgaacatgcaccttgggcactaacggattatggttttaaagtggttatcgccccaagttttgcagatattttttacggtaacgctttcaacaaccagttactgccggtaaaactgaacgatacagatgtcaatgagctatttgagtgggttcagcaaaacaaagcttgtcgttttactgtcgatctagaacaacagaaagtccacgctggcaataaaagctatgattttgaaatcgatagtttccggcgtcactgtatgatgaatggtctggatagtattggcctgacattacaacatctggatgccataataacctacgagcaagaacaaccggttttcctacgttaa

SEQ ID NO: 10129 - DNA, 1410 bp, Photorhabdus luminescens
atggctaagactttatatcaaaaattatatgacgctcatattgttcgggaagtaccgaatgaaaccccgttactctatattgatcgtcatctggttcatgaagtaacctccccgcaagcttttgatggtttgcgtactaaaggccgcccagtgcaccaaccaggtaaaacgttcgcaacaatggatcataatgtatccacgcaaacaaaagatattaacgcttgtggtgacatggcacgtattcaaatgcaggagttgatgaaaaactgtgccgaattcggtatcacattatatgacctcaatcatccctatcaggggattgttcatgtcatcggccctgaacaggggataaccctgccaggcatgacgattgtttgtggtgattcccacactgccacgcacggagcattcggctcgttagccttcggtattggcacttctgaagttgaacatgtactcgccagccaaactctaaaacaagcccgtgccaaaactatgaaaatcgaagtgatgggtgatgtcggtgacgctattaccgccaaagatatcgttctggcgattatcggcaaaacaggtagtgcaggtggtacagggtatgtggtggaattctgtggtaaggcgattgaagcacttagcatggaaggccgtatgactttatgtaacatggcaattgaaatgggtgctaaagcaggtttggttgcaccggatgaaaccacttttacttatatgaaaggccgccagttctcaccaaaaggagagctgtgggaacaagctgttgcttactggaagacattgaaatccgatcctgatgcacaatatgacaccattgttacgattaatgcagaagagatctctccgcaggttacatggggaacaaaccctgggcaagtgatcgccattgatcaaacaattcctgcaccggaatcttttagtgatcctgttgaacgagcatctgctgaaaaagcactggcgtatatggatttgaaacccggtattaaactaacagatgtgaagatcgataaagtctttatcggctcttgcaccaactcccggattgaagatttacgggctgccgcagctatcgcacaaggtcataaagttgcacctggtgttcaggcaatcgttgttcccggatcaggccccgttcaagcacaagcagaagcagaaggtttagataaaattttcatagaggccggttttgaatggcgcttacccggatgttccatgtgtctggcaatgaataatgaccgcctgcaacccggtgaacgctgcgcttctaccagtaaccgcaactttgaagggcgacaaggacgtggtggacgcactcatttggtgagtccagcgatggcagcagcagcagcgattaatggtcattttatcgatatacgccacccagcacagaagtcataa

SEQ ID NO: 10130 - DNA, 1092 bp, Photorhabdus luminescens
atgtcgaacaattatcatattgcagttttacccggtgatggtattggccccgaagttatggcacaagcctataagatattggacgcaatccgtaagcgtttcaatatctgtatcaccaccagcgaatatgatgtgggtgggattgctatcgatcgccacggctgttcactaccggcaaaaaccgtagcaggttgcgaacaggctgatgccatattgttcggctccgtgggagggcctaaatgggaacatttaccaccagcagaacaacctgagcgtggtgcactgttgccattgcgcaagcatttcaaattattcagtaacttacgccctgcccgcttatatgccggattagaggtattttgtcctttacgcaatgatattgctgccaaaggctttgatattttatgtgtccgtgaattaaccggcggtatctattttggtcaacccaaaggacgtgaaggccaaggtaaatatgaacgagcatttgatactgaggtttatcaccgttttgaaatcgagcgcattgcccgcatcgccttcgaatccgctcgcaaacgcagtaataaagtcacatctattgataaagcaaatgtgttgcagagttccgtattgtggcgagaagttgttactgagattgcaaaagcgtatccagatgtagaaatcaatcacatgtatattgataacgccactatgcaattaattaaagatccgtctcagtttgatgtgatgctgtgctccaatattttcggcgatatcttatctgatgagtgcgccatgattaccggttcaatgggcatgttaccttctgccagcctgaatgaaaaaggttttggcctgtatgaacctgctggtggttctgcaccagatattgccggaaaaggtattgctaacccgatagctcagatcctatctgccgctttactactgcgctatagcttaggtcacaatgacgccgctaatgcgattgaacaagcggttaactacgcgctggaacagggctatcgcacaacagatttagccggaaacggtaaagcaattagcactgatgaaatgggcagcactatcgcccgttacatagccgagggtgtttaa

SEQ ID NO: 10131 - DNA, 1563 bp, Photorhabdus luminescens
atgaaccagcaagttattatcttcgacaccacgttacgtgatggagaacaagcattacaggccagcttatgtgtgaacgaaaaactccagattgccttggccttggagagaatgggtgttgatatcatggaagtcggttttccagtttcctctcctggtgattttgaatctgtacagacgatcgctaagcagataaaaaacagccgtgtttgcgccttagcccgttgtgtagaaaaagacattgacgtggcagcagaagcattaaaagttgcagacgcttttcgaatccacgtttttttagccacttccgatttacatattgaatccaagctgaaaaaaacattcgaaaatgtcatggaaatggcaacgcaatcaatcaaacgagcacgtcgttacactgatgatgtcgaattctcctgtgaagatgcgggccgtacacctattgataatctgtgtcggatcgttgaaaacgctatcaaagcaggcgcaacaacgatcaatatcccagatactgtcggttacaccacgccatatcaatttggcggcatcatcactaacttgatcgaacgcgttcctaatattgataaagcgataatatccgtccattgccacgatgatttggggatgtctgtcgccaactctatcacagcagtacaatccggtgcccgtcagatagaagggacgataaacggtctgggtgaacgtgccggtaactgttcactggaagaagtcattatggcgattaaggtccgtcagcaaatgttaggcgtttatactaatatcaaccatcaggaaatttaccgcaccagtcagttggtcagtcaattatgcaatatgccgatccccgcgaataaagcaattgttggtagcaatgcattttcccactcatccgggattcatcaagacggggtactgaaaaatcgtgaaacttacgaaattatgacaccagagtccatcggcctgaaagaaattcaattgaacctgacttcccgttctggtcgcgccgcagtgaaacaccgtatggaagagatgggatatcaggataaagattacgatctgggtagcttatacgaagcctttttacgcctggcagataaaaaaggccaggtatttgactatgatttggaagccttagcgttcatcaatttgcaacaacaagaacccgaatttttccatctggacaactttaatatccaatctggctccaacgtgatggcaacagccgctgtatgtttagtgtgtggtaaagagttgaaatcagaagcggccacaggtaacggcccggtagatgctgtctatcaggcaatcagtcgaataactgaatacccaattgaactggtttcttatcagttatcaggtaaaggccaaggaaaaaatgcattgggtcaggtcaatatcgttgtcgaatgctttggacgtcgcttccacggcatgggattagaaaccgatattgttgaatcctctgccaaagcaatggttcatgctctgaactgcgtttggcgtacagagcaagttaagaaagagaaacaacgcatacagcaaaatacaaaggaaatggtgtaa

SEQ ID NO: 10132 - DNA, 945 bp, Photorhabdus luminescens
atggctgaatacacctcagtaactgcaatcaaaaaagatccaaatgaaattcatttacgtaatgtggatctcaatctgctgactgtttttgatgcagttatgcagatgcagaatgtaacacgtgcggcacagatgttaggaatgtcacaaccggctgtcagtaatgcggtttctcgtttgaagctcatgttcaatgatgaattatttgtgcgttatgggcgtggaatacaaccgacggcaagagctcatcaattatttggtccagtccgtcaggcattacaattggtatataacgagttacctggggttggttttgaacctgataatagtgatagggtttttagtctttcaatttgtagccctctagatattagattggcggcaaaaatagttgaacaggtgaagcaaaacacacccaatctgggtgtgacgattagatcatatctgcatgataatattgaacatcagctcaggtatcaggaaactgagtttgtcattagctatacgcagctagaacgtatggattttcatcattacccgttattcaatgatgagttggttttggctgtttctaatcatcatccaagaattgaaaatagtattagtgagcagcaattgtatgaggaacatcatgccgttgtatcactggataatatatgttcattcagcgttccctattatgatggaggtaaacgtttgcgttcggtggtttatcaggggaccgatttgaatagtgtgttgcatattgtttctcaaacctatttggttgcgattgcgccaagatggttagttgagcactatagcgaacaattagcaataagagcggtttcattaccgtgggataaagtaagtcgtccgtgttatttgatttggcatgaatctacaacgaaagataaagggcatcaatggatgaaatcgttgttgagtcaacttagtagcagataa

SEQ ID NO: 10133 - DNA, 1803 bp, Photorhabdus luminescens
gtgataactaaaaatttacatccttatcacttgataaaccggttgcaacaacaaataaaacaacacccagagaaaattgcttttcgccaatggtctccggctgaacaactcgaactaaactggcatgatattggcaaaaagaccgacgctattagccgggcgttgttggagattggtgttgatgtgcaagaaaaaattggcctctttgcacataacagcatggcgtggtcattggcagatatcgctgtattacaacttcgggcggtcactgtccctctgtatgcaaccagtagtcaggaacaggctggtttcatacttaatgatgctggtgtgcgtattttgtttgttggtgggcaggcgcagtatgatgttgctattacgttgacagaatgttgccctcagttaagtcacattattgtcttagatgaatcagtcgatttgcgggattgttcattagctcagcatttatctgatttcatggtcgataatgaattaccctgtcagtccgagttggaaactcgtattgctaaccacaatctggatgatctttttacacttatttatacgtctggtaccacgggtgagcctaaaggcgtcatgcttgattaccgcaatttagcctatcagttgtattcacatgatcatatcctggcattaactgatcaggacatttctttgagttttctgccgttatcccatgtctttgagcgtgcatggagtttctatgtcatgcatgtaggggcacaaaatgtttatctgactgacactaattttgttcgtcaagctatggcggatgtctgcccgacagtgatgtgtgcagtgccgagattttacgaaaaaatttatagtgcggtttttgaaaaggtttctaaggctccttggcatcgaagaaaactttttaattgggcgattaaatgtggtgagcgtcagtttttacgtaagttgcagagtaaaaaaagctgcccttggtcaacagcaatgcatcgactggctgataaattggtgttgagcaaattacggaatgtgttggggggcagagttcggtttttacctgctgctggtgcacgtctggacgaaacgattatcctgttctttctcgctgttgggataaatatcaaatatggctatggcatgacagagacttgtgccacggtttcctgttgggaagagcaaggttatgtacttggttctattggtaaaccatcgcctggcattgacgtccgtatcggtgaagaagatgagatacaagtgcgtggcccaattgtgatgaaaggctatttcaataatcagcaagaaaccaccaaggcatttactcaagacggttggttgcgtacaggtgatgccggtaagttggatgaaaatggtaatttgttcattactgaacgcctgaaagatttgatgaaaacatcgaatggcaaatatattgcccctcaaatgattgaaggcattttgggacaagatcgttttattgaacatgttgctattattgctgatgctcgtaaatttgtatcggctcttatcgtgccttgtcatgaagcattggaagagtatgcaaggtcaattaatctcaaatatcatgaccgggttgaattactgcgtcatagtcagattatcaatatgtttgagcaacgcttgaaagaaatgcagaaaaactttgctcacttcgatcaggtaaagcgtttcatattactgccaaaaccattttcaatggaaacgggtgaattaactccaacactgaaattgaggaggaaaattattatgcagcgttactatgaagaaattgaatctatgtatcaggattga

SEQ ID NO: 10134 - DNA, 570 bp, Photorhabdus luminescens
ttgatgaattttaataatgtagttattgttcatggttttttagcaactcccgatcaccattggtttccttggcttaaagatcagtatgaaaagttaaatatcaatgttattgtgccggaactgcctgaatctcatgttccttccccccatttatggcaagaaaaattgcaggagagcatttcaaatcctaatgaaagaacactttttatcgggcatagtctgggttgcattgctacactccgttatatctcatctttacctgataatataaatattggggggattgtattaattgcaggattttatgaaaaactatcaactttacctgaattaaatacatttactgaagaggggctggattttcacttgctcagacagaaaataaaccaacgaataacaatattatcgcttaatgatgagattgtatcgccacagtttaccttaaatttgagtcagcagctccgggctgaattatatggttttcctgatggcgggcactttttagatcgcgacggttttactgtttttcctaagctagaaaaggtattaaaagataactcaatgttgtga

SEQ ID NO: 10135 - DNA, 627 bp, Photorhabdus luminescens
atgaaatatatacttttgctgataatcgtattatttaccaatgcatgtgcagaaccgacgaaaacaaatattcctagaactgtatttgatggaattaaatatacaggtatggttaaggaactgccactgaaagtaccgagaacagttgaagagtttcgggaactggaaaaacaagctcagaatggtagctctaatgcctattttttattaggaaaactttataccgacagttcattaaagaaatcagaaagagattaccaaaaagccatcgagtattatagcaaggcattaaagttagataaaaaccatgcggaatctttatataatctcggtataatttatagttttggttatggagtacaagaagatcaaataaaagccaatgatctacttcaaagagctggagattctggcataataaatgggtatcagataataggggtgaattatttacatggtttagggaatagcccacaggatttagaaaaggcatttcattatattaaaataaatgctgaaaagggcatcgtggaaaaagaaatatctcaagaaataataaatcattgggataattttttaattctcatgggatataaacccatcccattagtaggaaaaagtaactaa

SEQ ID NO: 10136 - DNA, 1266 bp, Photorhabdus luminescens
atgcctgatgaaacgctacaacaacctaaacataaaacaataggaatatttgaaaactatcaagaaattatgcccgacgataaactttcatactttgaaaacacaccgtctataaccttgcatgtagccccccaaggtgctcctatagcaggagaaaatggaatcaatataggtaaatcacttacgggtcatgttttctataccatcagaaataacaaccccaaaactggtaattttgagtccattaccgcaggattaagtccgggggaagattggggtaccgttaaagacaatttgtcgtttaatgaccatatacgctaccctacggcctcatcactaacaatggtatcccaaaaccttcaattcttgatggaccttgatatggtttttcagaaaactattgattaccgggatggaaaaacgcaaccaccatcctataatttattaacaaataactgtattgattttgtaaaagagacgtttcacagaaagggaggacatgctggttactctggcattactctaaacttagagaagactcctaatcaagtactcaatcaaattttcccaaacccgaaaaaagttacgaaaacttacataacaccattagtaattgatttaaatggcgatggcgttcaaacagtaaccagtgaattaggagtaatatttgattttgacggtcaagggcagaaagtcaatacaggttggatcgatgcaaatgatagcctattagtctgggataaaaacaatgacggattaatcaataatggcaccgaattgtttggggaaaattcccaactgtcatctggagtaaaagcacaacatggttttatggctttagctgatatagacagcaatcaggacggtattattgataaccaagatgtaacttggaacacattaaaaatctggcaggataggaatttagacggactcagtaccccagatgaacttaacagccttgaagaaaccgatattaaatctattcaactaaactatcaggagagcgattattttgacctacaaggtaattaccacggactgacatctaccgtcaactggtcaaatggatatcagacagagatcacggatgtctggtttaaacaggagccaatatctatacacgaagctgaactaagtaacgaattacataatctaattaatgcgatggcctgctttgtcagccagcaaacagcagaaattaacaacactatctctgtcgggataacaccaattcaacttcttaccgtcaactcgataggataa

SEQ ID NO: 10137 - DNA, 438 bp, Photorhabdus luminescens
  misc_feature (247)..(247): n is a, c, g, or t
atgcagggctgtctggaatacagatatacccgtcatctttcaagttgcctctttgttggctgcgctcactcaccccggtcacatagttatctatgctcccggggattcgctcccttgccgtcgcgatgcatcttgaaatccatagggtataaacaacatttcatttcgtgccaaggaaaccaagttgtgtccctcaattcaataatcgtcctaagaaatataaacggatacaacctaatttattcgnctatcattcagttagataaaaatcatctgactgttaatggtgaacaaatgatgctagttgccaatattaacataaaggtagaaacaaaaactgaccgactgaaaattattgactatgggctcagcccgttaaaaaccaaaaccgaagaaagccttttaggaacgataatgacttctcaattcattttttaa

SEQ ID NO: 10138 - DNA, 84 bp, Photorhabdus luminescens
atgaagctgataaaggaaatgcagacaaatgcctcagataatttgaccgtcatttcctcgtttttggatagccattgcaaataa

SEQ ID NO: 10139 - DNA, 1755 bp, Photorhabdus luminescens
ttgcaaacagagcctggaggaaaacctatggagatgttatcaggagctgaaatggtcgtccgatcgttaattgatcagggcgttaagcatatattctgttatccggggggggcagtactggatatttatgatgccctgcatacggctgggggcattgagcatatcctggtacgtcatgagcagggggcagttcatatggctgatggttatgctcgatctaccgggaaggttggtgtggtattaatcacctacggtccaggagcaaccaatgccattaccggtattgccacagcttatatggattcaattccgatggttgtattgtccggtcaagtcgccagttcgttgatcggtaatgatgcattccaagaatgtgacatggtagggatatcccgcccgatcgtaaaacacagttttttagtgaaaaaagcagaggatattccgaaggtactgaaaaaagctttctatctagcttccagtggtcgtccgggacccgtcgttattgatttaccaaaagacacggtaaatccggcagtaaaattaccctatatttatcctgatcagataagtatgcgttcttataatccaacgattcaaggacacaaagggcagattaagcgggcattaagaaaactattgaatgcgaaaaaaccagtcatatatgtaggcgggggggcgattaacgcagattgttcagcagaattactggtattggcagaaaaattcaatatccctgttgtgagctccctgatgggcttaggcagtttccctgcaactcatccgcaaagcctgggcatgctcggtatgcatggtacattcgaagccaacaaagccatccataattcagatgtcatttttgctgtcggtgtacgttttgatgatcgtacaaccaataatctggagaaatattgcccggaagcaacggtattacatattgatattgatccaacatcaatttcgaaaacggtttccgcagatgtacctattgttggtgatgctaaacaggtgcttggacaaatgttgtcgttgctggagacagtagaagacacacaagatccagatgcgctaaaagattggtggttatctattcagcaatggcggagccgtaaatgtcttagttttgatcgcagtggtgaaaagattaaaccacaagcggctatcgaggttctctatcgtctgacgaagggagaagcttatgtcacttcagatgttgggcagcatcagatgtttgttgcattgcattacccatttgataaaccaaggcgttggatcagttccggtggtttggggacgatgggatttggtttaccggcggctttgggcgttaaactggtgaaaccggaagcgacggtagtctgtgttacgggggatggtagtattcagatgaatattcaggagctgtccaccgcattgcaatatgggttgccggtactggttctgaacttgaataatcgtttcttggggatgataagacaatggcaagatatgatttatgctggtcgtcactctcaatcttatatggaatccttgcctgattttgtcaaattggctgaagcttacggtcatgttggcatttctattcaacgttatgatgaattggaaagtaaattggccgaagccttgaaagaggtgactgaaaatcagcggctggtatttgttgatatcactgtggatgaaactgaacatgtatatcctatgcagatccgtggaggagcaatggatgagatgtggttaagcaaaacggagagaacctga

SEQ ID NO: 10140 - DNA, 492 bp, Photorhabdus luminescens
atgcgccggattttatctgtattacttgaaaacgaatcaggggctttgtcccgggttgttggtctgttttcccaacgtggctacaacattgaaagtttaactgttgccccaacggatgatccgacattatcgcggatgacaattcagactaagggcgatgcaagggtacttgaacagattgaaaaacagttgcacaagttggtggatgtgttgcgagtcagcgagttggcaccgggttctcatgtggagcgtgagattatgctagtcaaattgcaggccagtggatatggacgtgaagagatcaagcgcagtactgacatcttccgtgggcagatcgttgatgtgactgcgaccttatataccgtacagttggtgggaaccagcgataaattggatgcctttctcgatgctgttcgggatgttgctgaaattgttgaagttgctcgttcgggtattgtcggtgtctctcgcggggataaaattatgcgatga

SEQ ID NO: 10141 - DNA, 1008 bp, Photorhabdus luminescens
gtgaaactggatgaaatcgcccgccttgcaggtgtttcacgcacaacggccagttatgtaattaatggtaaagccaagcaataccgtgtcagtgataaaacggtagaaaaagtgatggcagtagtcagagagcataattaccatcctaatgctgtggcagccggtctccgtgcagggcgtacccgttctattggtttggttattccagatttagaaaataccagctatacccgtattgctaattatttggaacgtcaggctcgtcagcgtggctatcagttattgatagcctgttcggaagaccaacctgagaatgaaatgcgttgtgttgaacacctgctacaacgtcaggtggatgcaattattgtttctaccgcattaccgccggagcatcctttttatcaacgctgggctagtcgttctttgcctattattgctctcgatcgggcacttgaaaatgaacactttatcagcgtagtgggtgatgattttgaagatgcaaagatgttggcacaagaatttcgtcaattcccggctgaatctgtgctttatctcggtgcattaccggagttatcagtcagttttctgcgtgagcaggggttccgtgaagcatggaaagatgaccctcgtaaagtgatgtatctttactcaaacagctatgagcgtgatgcggctgctgaagtattcaccaaatggttagaaactcatccaatgccacaagcgttgttcaccacctcttttgccctgttacagggggtcatggatgttacccttaaacacagcggccgtttaccaaatcaattggttattgcgacttttggtgatcatgaattattggatttccttgaatgtccagtgctttctgtagcgcagcgtcatcgtgaaattgctgaacgggtattggaactggtgttagcaagtctagatgaaaagcagaagccagggccaggtatcacacggatacatcgtgacttatgtcggcgaggaagcctgagtcggaaaatatga

SEQ ID NO: 10142 - DNA, 459 bp, Photorhabdus luminescens
atgtttcgtggagcaacgcagataaatctcgatagcaaggggcggctcaccgtacctacccgataccgggctatgctaaatgaggaatcacaagggcaaatggtttgtaccattgaccttcatcaaccgtgcttgttgctttatacattatctgaatgggaaattattgaagaaaaactttctcgcttatccagcatgaatccggcagagcgtcgggtgcaacgtttgcttttaggtcatgccagtgaatgccagatggatagtgcaggacgtcttttgttagctaatacattgcgtcagcatgcagggctagtcaaagaggtcatgctggttggtcagttcaacaaatttgaattgtgggatgaacaggcttggtatcaacaggttaaagatgatattgcggctgagcaatccacacaggaacctttatcagtacggctacaggaattatcactataa

SEQ ID NO: 10143 - DNA, 945 bp, Photorhabdus luminescens
atggcaaatagtcattttaaacataccagcgtattgttggatgaagcagtcaacgggctgaatattcgtgaaaatggcatctatattgatggcacatttggccgtggagggcattcacgtctgattttgtcgcaattggggactgagggtcgcttaattgccattgatcgagatcctcaggcgattgaagtggcgaaagcgattacagatccacgtttttcaattgtacatgggccattttctaaattggctcactatacagaaaaagccgggctaatcggcaaaattgatggtgtattactggatttaggtgtttcttctcctcagttggatgatccggaacgcggtttttcttttatgcgtgatgggccgctagatatgcggatggacccgactcgtgggcagtcagcagcagaatggctgatgaacgcaacagcagatgatattgcctgggtattgaaaacatttggtgaagagcgtttcgccaaacgcattgccagagcaattgtggcatgcaatcaggaagagccaattactcgaacaaaagcgttagccgatttgattgctcaggccagcccgataaaagaaaaacataagcatccagcaaccaagagcttccaggctattaggatctatatcaacagtgagctggaagagattgagcaggcgctggagggagcattacaagtgcttgcaccgcaagggagactttcagtgattagtttccattcgctggaagatcgtattgttaaacgatttattcgtcagaatagtcgagggccacaagtaccggcaggattgcccctcaccgaagagcaactgaaagcacgcggtgggcgtagcttgaaatcgattggcaagatgaaaccttcagaggaagaagtggctgataatccacgggctcgtagttctgttttgcgttttgctgaaaaagttagtgaataa

SEQ ID NO: 10144 - DNA, 318 bp, Photorhabdus luminescens
atggcaggtgaacgtcacggattaaccggtattatcggcagcgatttgctcaagaatgccaagataccgttaattcttctagtcgttgtactggtttcggccatagttgttgtaaccactgcacatgaaacccgcttgttgacggctgaaagagagcatctggtggtggaacgtgatgcattagatatcgagtggcgcaatttgatcctcgaagaaaatgccttgggtgatcacagccgggttgagcggatagctgttgaaaaaatgcatatgcagcatgttaatcctgctcaggaaaacattgttgtttcacagtga

SEQ ID NO: 10145 - DNA, 1767 bp, Photorhabdus luminescens
atgaaagcagtacgctccgtgaagttaaaaaggcaagaagataaagccagttttgttagctggcgttttgctttgttatgcggggggattgccgtagctttaattgccttattgctgagagtgacttatttgcaggtcatcaatccggatcaactggttaaagaaggtgatttacgttccctgcgcgtgcaatcaatccctaccgctcgcggtatgatcagtgaccgaatggggcgacctctggctgtcagcgttccagtcaatgctgtttgggcagatccgaaagaggtatttgaaaaagggggtattacggatgatacccgctggaaagctttatctgatgccattaatttacctcttgaacaacttaacgacaaagttagcgctaatccaaaaggccgttttgtttatttagcgcgtcaggttaacccatcggttggcgattacattcataaactgaaattgccggggatttatttacgtcaggaatcccggcgttattacccgtcaggtcaggtaacggcacatattattggcgtgaccaacgttgatggtcagggtattgaaggcgtagagaaaagttttgatcgttggttgacaggtcaaccgggtgagcggactgtacgtaaagatcgctttggtcgtgtcatcgaagatatctcatctgttgatagtctggcggcccacaatctggtattgagtattgatgaacgtttacaggcgctggtttaccgcgaattaaccaatgcggtggcctttaacaaagcagaatccggtacagcggtgttggtggatgttaataccggagaagtgctggcaatggcaaacagcccatcttataacccaaataatcgcatcaatacgccaaaagaagtcatgcgtaaccgggctatcaccgatattttcgagccaggttccactgttaagccgatggtggtaatggctgcgctgaatgatggtatcatcaaagaaaataccgttattaatacagtaccttataggataagcggtaaggaaatcagagacgtatcccgttatccagaattatctatcactggtattttacaaaaatcgagtaacgtcggtgtttctaagctagcgttggcgatgcccgcgacagaattggtggatgtttattcacgttttgggttaggaaaggcgaccaatctggggttggttggagaaagcagtggcttatatccaacaggaaaacaacggtggtcagatcttgatagagcgaccttttcttacggttatgggctgatggtaacaccattacagttagcgcgggtctatgcaacgattggtagcttgggtatttatcgtcctctgtcaattaccaaagttgatccacctgtgccaggcacaagagtatttcctgagcctattatgcgaacagtcgttcatatgatggaaagtgtggctctgcccggcggcggcggagtgcgagctgcgataaaaggttatcggattgcaattaagacgggtacagctaagaaagttgggccggatggcaaatatgctagtcgatatatctcttacgccgcaggtgttgcccctgcaagtaatccaagatttgcactggttgtgatcattaatgatccactgacaggtaagtattacggcggtgtggtttctgcgccggtatttggtgccattatggggggcgttctacgcatcatgaatgtggagccagatgctttggcggcaggtgataaaaacgaatttgtgattaataagaaagaggatacaggtggcagatcgtaa

SEQ ID NO: 10146 - DNA, 1488 bp, Photorhabdus luminescens
gtggcagatcgtaatctacgcgatttactcgcgccgttgggtattgacgccccagtgcgtgagttacgcgaaatgacattggacagccgtaaatcgtctgccggagatctgtttgttgctattaaagggcaccagacagatggtcgacactacattcctcaagccatcgcacaaggggttgcggcggttattgcagaagcccaaggcgaggttgataacggaaccgtacaaattatgcatggtgttccggttgtttatgtgaacgatttgaataataagttgtcacagttagctggtgagttttattgtcaccccggtgataaattgcacttgattggtgtaaccggaaccaatggtaaaacaaccactactcaattacttgcgcagtggagccacgggttaggggaaaccagtgccgtgatgggaacggttggcaatggtttactggggcgtgtggcgccaagtgaaaataccacaggctctgctgttgatatccaactggatttgcaacaacttgttcggcaagaggcgacttttgcggcaatggaagtctcttctcatggactggttcaggggcgtgtggctgcgttgccgtttgaggcggcagtgtttaccaatttgagccgtgaccatcttgattatcacggtgatatggaacactacgaagccgctaaatggctgctattttccactcataatgtgaagcaacaaattattaatgctgatgatgagattggattgaaatggttatcccgtttaccacaagcggttgctgtaacgatggaaaaccgtctgccggaaaattggcagggccgttggttggcagcgcgtgaaataaagtatcacgataaaggggtatctatcaccttcgagtctagttgggggggcggtacaattgatagttccctaatgggggcatttaatgttagcaacctgttgttggcactttccaccctattagctctggattatccattggaaaaactgcttgaaacagcttcctgcctggaacctgtctgtggacgaatggaagtattcactacaccgggcaaaccagttgtcgttgttgattatgctcacacacctgatgcgttggaaaaagctttgatggctgcacgtttgcattgtcaaggtaagctttggtgtgtttttggttgtggtggtgatcgtgataaaggtaaacgtccactgatggggggggttgcagagcagttggccgattatgtgattgttactgatgataatcctcgcaatgaagaaccgcaggcgattattgctgatattctgacgggttttcttgatccggggagagcgatagcgattcatggccgtgttgaagcggtaaccaacgctattatgcaggcaaaagcagatgatgttgtattgatagcgggtaaaggccatgaagattatcaattggtcggccatcgtcgactggattactcagaccggttaactgttgctcggttactgggggtaattgcatga

SEQ ID NO: 10147 - DNA, 1380 bp, Photorhabdus luminescens
atgatttccctcactttgcaacaactttcacaagtaacagatggcgtattgaatcaggtgactgaacaacaggctgccaatatttgtatcagtgatgtgactactgacagccgtcgggttggcaatggcagtctgtttattgccttgaaaggtgagcgctttgatgcgcatgatttttttgctgatgcagtcaaagctggtgctggtgctttgctcgtcagccgggtattagatattaactttccacaggtcgtggttaaagatactcgtttagcaatgggtaaattagcgagttgggttcgccagcagagtaatgcccgtgttgttgcgttgacgggttcgtccggcaaaacatcggtaaaagagatgaccgcagcgattttgcgccaatgtggcaacacgctctataccgcaggtaacctgaataatgatatcggtgtgccgctgacattgttcagactgacagaacaacatgagtttgctgtggttgaattaggtgcaagccatgttggtgaaattgcctataccgtagaaatggctcggccggaaacggcgttagtcaataatctgtttgctgcgcatttagcggattttggttctcttgcgagtattgcaaaagctaagggcgagatttttactggtctttcagagaaaggtacggccattatcaatatggaaagcaatgattgggctcactggcagcaggttattggcgacaaaacagtacagcgtttttccatgcaacaagcatcaggtgctgatttttacgctacagatattcaggttaaacaactgacgacggatttttgtctgcatacgcctattggtagcacagaaatcaatttgccgttgcctggaaaacacaatgtcgccaatgcgttagcagccagtgcgttagcaatttctgttggcgcaaccctgcaagatattcgtctgggcttatctgagctgaaagcggtaccagggcggttgtttccaatcaatctggcagaaggaaaattgctgcttgatgatacttataacgccaatgtcggctcaatgactgttgcagttcaggtgttatcacagatgccgggttaccgagtgctggttgtaggcgatataggggcattgggtgaacagtcagcagattaccatcgtcagattggtgaaaccgtagcttcttgcggtatcaatagtgtgttcagtgtgggcaaattaagtattcatgttagtgaagcgagcggttgtggtcagcattttgcggataaagctgcattgatcgcaacattggttccactattacaacaacacaaagtcttttcagtgttagttaaaggttcgcgtaataccacaatggaagatgttgtccacgcattacaggagagcttcacatgttag

SEQ ID NO: 10148 - DNA, 1083 bp, Photorhabdus luminescens
atgttagtttggctggccgaatatttggtcaaatatcactccggctttaacgtcttttcttacttgacgtttagggctatcgtcagcctgctgactgctttggctatcgcattgtggatggggccgcgtatgatcgcctttctgcaaaaattacaaatcgggcaggttgttcgcaatgatgggccggaatctcactttagcaaacgtggtacgccgacgatgggtggtttgctgatcttactttcaattacgatttctacactgttgtgggtgcgcttgaataacccctatgtttggtgcgtgctgattgtgctgattggttacggcattgttggttttgtggatgattaccgcaaagttgtgcgcaaagatactaaggggttgattgcccgttggaagtatttttggcagtccgtcctggcattgggggtggcgtttgcaatgtacagtttcggtaaagatactccggcaacacaattggtcgtgccattctttaaagatgtgatgccgcaactgggtgtgctttatattctgttgacctactttgtgattgtcggaaccagtaatgcagtgaatttgaccgacggattggatggtttggcaattatgccaaccgtttttgttgcagcgggttttgctttggtggcatgggcgacaggtaatgtcaattttgctaactatctgcatatcccttatctgagccatgctggtgaactggttatcgtctgtactgcgattgtgggtgctggattaggtttcttgtggttcaacacttacccggctcaggttttcatgggggatgtgggctctttggcattaggcggtgcactggggacgattgctgtgttgctacgccaagagtttctactggtgattatgggcggtgtatttgtggtggaaaccctgtcagttattttacaggtgggttcttttaaactgcgcgggcagcgtattttccgtatggcacctattcaccatcattatgaattgaaaggctggccagaaccgcgtgtcattgtgcgtttttggattatttctctgatgctagtgctgattggcttggcaacattgaaggtacgttaa

SEQ ID NO: 10149 - DNA, 1311 bp, Photorhabdus luminescens
atggcggattatttgggtaaaaaagtcgtcattatcgggttggggctgacgggtctctcctgtgttgacttttttatggcacgaggcgtgatccctcgtgtgatggatactcgtacggcaccacccggcaaggataaactgcccgatggtgttgagtgtcacagtggaagcctgaatgctgactggttgatggatgctgatttgattgtcgtaagcccgggcattgccttggcaacggcggtattgcaggctgcggctaatgcaggtattgaaattgttggtgatatcgagttgttttgccgtgaagcaacagccccgatagtcgccattaccggttctaatggtaaaagtactgttaccagtcttgtcggtgaaatggcgaaagcggctaattggcaggtgggtgttggcggtaatattggcctacctgcattagaattgttgaagaaatcttgtcagctttatgtcttagagctctccagtttccagttggaaactacatatagcctgaacgcaacagccgccgctgtgcttaatgtaactgaggaccatatggatcgttatcctcagggggtatctcagtaccgggcggctaaactgaggatttatcatcaggcgaaaagatgcattgtgaatgctcaagatcccctgacactgcctgaaatgggtatggatagccgttgtgtcagctttggtgtcgattgtggtgactaccagcttgatagtgaaaatgcttttttgaaagttcacaaccaatcactgctggcgacaaatgaaattaagctgactggacgacataactacgccaatgggttggttgcattggctttagctgatgcggttggtattcctcgtgaagccagtttggcaacattgacggtttatccggggcttgaccatcgtttccagcttgctcgtttgaacaaaggagtgcgttggattaacgattctaaggcgaccaatgttggcagtacgatggcggcgcttgatggtctgaatctggagggaacgctttatttgctgttaggtggtgatggcaagtcggcagacttttctccgcttaaacctttcctttgtgggaataaagttcagctttactgctttggtcgagatggaaaacagttggcgcaactacgcccggaaatagcgacattgaccgaaactatggaacaggcgatacgtgatattgctccgcgtctggtggctggcgacatggtgttgttatctcctgcttgtgcaagccttgatcagtttcgtaattttgaacagcgtggtcatgagtttacccgtttggcagaggagttgggctga

SEQ ID NO: 10150 - DNA, 1194 bp, Photorhabdus luminescens
atgtctattccgggattcagtagattaaaagactgggttattggtggccgtgaaactgatgccaccaatatggtgttgtatgatcgcacactggtttggctgacactcggattgggaattatcggctttgttatggtgacatcagcatcgatgccggttgggcagcgtcttgcagaagacccgtttctgtttgctaagcgtgatgcaatttatctcttgctggctttcgggttgtcattgatcacattgcgtatctcgatggatttctggcaacgctatagcaatctgatgctgcttgtttccgttattttgttgttggttgtcctggtggtgggaaattcagtcaatggggcatcgcgttggattgccattgggcctttgagaattcaacctgctgagttatcgaaactttctctattttgctacctcgccagttatttggtgcgcaaagtagaagaagtgcggaataacttttggggattctgtaagccaatgggtgtgatggtcgtgttagcggtgttacttctggctcaacccgacttggggacagtggttgtactgtttgtaacaacgttggcaatgctatttctggccggggctaagttatggcagtttctagcaattattggttcaggggtattcgcggtggttttgttaatcattgctgaaccttaccgtatacgccgtgtaacttcctttctggatccttgggaagatccatacggcaaaggttaccaattaacgcaatctttgatggcttttggtcgtggggaatttttagggcaaggactaggaaattcagtacagaaactggaatacctgccggaagcacatactgactttattttctctgttttagcagaagaattaggttacgtaggtgtggttttggtgttgttaatgatattcttcgtcgcttttcgcgcaatgacgataggtcgtcgcgcattacagatggatcagcgtttttcgggttttctggcttgttcggtgggtatttggtttagtttccaagctctggttaacgttggggccgccgcaggtatgttaccgactaaaggtttgactttacctttgattagttacggtggttcaagtttgctgattatgtcgacagctatcgtattgctattaagaattgattttgaaacacgcttggcaaaagctcaagcgtttgtaaggagcccccgatga

SEQ ID NO: 10151 - DNA, 1068 bp, Photorhabdus luminescens
atgagtggcaaaacccggcgtttgatggtgatggcaggtggaactggaggacatgttttcccagggctggctgtcgctcatcatttaaaagatcagggctgggacgttctctggttgggaacagcggatcgtatggaagccgatttagtgccaaaacatggcattgatattgaatttattcagatttctggtctgcgaggtaaagggatcaaagcattgttggctgccccggtccgaattttcaaagcaatccgtcaggcaaaggcgattatgcgtcgctatcagccagatgtcgtgcttggcatgggaggatatgtttctggtcccggtggcattgctgcgtggatgtgcggtgttccggttgtattgcatgaacagaatggtattgccgggctgacaaaccggtggctggctaaaatcgctacgactgttttacaagcatttcccggtgcatttccaaaagcgcccgttgttggtaatcctgttcgcgaagatgtgttggcactgcctatacctgaacaacgtttgacagggcgtgaaggtccgattcgggttctggttgttggtggcagtcagggggcgagaattcttaaccaggcaatgcctgaaattgctgcccgtatgggtgataaaattactctttggcatcagacaggcaaaggggctaaagaaagtgttcagaatgcctatgacaattcagttaaatgcgaacataagattactgaatttattgacgatatggcacaagcttatgcctgggctgatgtggtgatttgtcgttctggcgcgttgacggttagtgaagtgtcagcggcgggattacccgggatttttgtgccatttcagcataaagatcgtcagcaatactggaatgcgttacctctagaaaaagttggcgcagcaaaaatactggagcaaccccaatttacagttgatgcagtaattgaattattaactcagtggcaacggccacaattgctggaaatggcggaaaaagcccgttcagcagcaattgttgatgcaactgagcaagtatcggcggcattgatcgatgcagcaaaaaaatga

SEQ ID NO: 10152 - DNA, 1476 bp, Photorhabdus luminescens
gtgaatacacaacaactggcgaaattaagagctttcgtgcctgagatgagaaaagtcaggcacatccactttgttggcattggtggtgctggcatgggggggatcgccgaagtgttggctaatgaaggttatcagattagtggatctgatttggcaccaaacccggtaactcggcaactgactaaattgggcgctcagatttattttaatcatcgtcctgaaaatatactggatgccagtgttgttgtggcttcaagcgcaatcttggcggataacccggaaattgttgctgctcgtgaggcccgaattccggttattcgcagagcagagatgttggcagaactgatgcgctaccgtcatggtattgctattgccgggactcacggtaaaacgacaacaacagcgatgatttctagcatctatgcacaggctggtttagatcccacttttgttaatggtggtttagttaaagcagcaggaacgcatgctcgtcttggcagtagccgttatttaattgcggaagctgacgaaagtgatgcttctttcttgcatttgcagccgatggtggcggtcattacgaatatcgaagcagatcatatggatacctatcatggtgacttcgaaaacttgaaacagacgtttatcaacttcttgcacaacttacctttttacgggcgtgcagtcatgtgcattgatgatccggttgtcaaagagttaattcctcgtgttggtcgctatatcacgacgtatggttttagcgaggaagcggacgtacgtattacccattatcagcaaaaaggtgctcagggatattttactgttagtcgtcaagatatggcggatctgaaagtcgtattgaatgcaccgggtcgccataatgcgctgaatgcggcggcagcagtggctgttgcgactgaggaagggatttctggcagtgatattttggcggcgttggcaggttttcagggaaccgggcgccgttttgattttttggggaatttttctctggaacatgttaacggcaaaggtggtagcgcaatgttggttgatgattatggtcatcatccaacggaagtggatgcaaccattaaagccgctcgtgctggctggccggataaacggattgtgatgatatttcaacctcatcgttatacccgaacccgtgatttgtacgatgactttgccaatgtattgaatcaggtagatgtattgctgatgttggatgtttactctgcgggtgaagtggttattccgggagcagatagtcgttcgttgtgccgtactatccgtagccgcggtaagttagatccgattttggtctctgatccggcaaaagtgaccgctgtgttggcacaggtgctggatggtcatgatttaattctggttcaaggggccggcaatataggcaaaatagcgcgtaatctggctgaaacaaaattacagccatctttgaatgaggaaaaacacaatggctga

SEQ ID NO: 10153 - DNA, 921 bp, Photorhabdus luminescens
atggctgagaaagtcgcggtactgttgggaggaacttccgctgagcgtgaagtttcgctgttatcgggacaagccgtgttggctggattgagagaagcgggtattgatgcacatccagttgatacaaaagattttcctgtgactcaacttaaagaggccggatttgagaaagtctttatcgcgcttcatgggcgtggtggggaagacggtactttgcaaggggtattggaatttttgcagttaccctataccggtagtggcgtgatggcttctgcactgtcaatggataaattgcgtacaaaacaggtatggcagggaattgggttgactgtttcgccgtatgtttcaattaattctcagcaagttgaacgattgactgattctcaactccaagaatatgtagcagatttaggtttgccattaattgttaagccaagtctggaaggttccagtgttggtatgactaaggttaatgagatttcggagttgcgtggtgcattagaggctgcgtttcgttatgacgttgacttgctggtcgaaaaatggttgcacggcccggaatacacagtagccatccttggtgatacggctttaccttctattcgtattcaacccgctgctgttttttatgactatgatgcaaaatattggtctgaagaaacacaatatttttgtccaagtggcttaagtgatgaaaaagagcagcaattggcagaactggcgcttaaagcttatcagtcagttggatgcagtggttgggggcgagttgatgtcatgatggatactgatggtgatttctatctgttggaagtgaatacctctccggggatgaccagccacagcttggtgccgatggctgcgcgtcaggctggattaagtttttcacagttggtggtaaagattttggagttggctgattga

SEQ ID NO: 10154 - DNA, 807 bp, Photorhabdus luminescens
atgtctcaagcggccctgaaagtgaggggacgggataatgaaagtagcagttcccgtcctagtaacggctcttacctggcagggcttatcttcttcctgatggtacttgggaccattatttggggaggtttggccgtccttaactggatgaaagatgctaacagattgcctatttcaaaactggtggtaacgggtgagcgtcactacacgaccaacgatgatatccggcgggcaattttgtcattagggcaaccgggaactttcatgacgcaggatgtgaatatcattcagcaacaaattgaacggatgccgtggataaggcaagtcactgtccgtaaacagtggcctgatgaactgagaattcatctggtagaatatgttccttatgtgcgctggaatgacacacagatgctggatgccgaaggtcaggtattcagcattccggctgaatggggagctaaagggtattttccgatgctttatggcccacaaggcagtgaaaaagaagtccttgatggttaccgggccatgactaaacttctcgctgccaataaactgaaattaaaatcggcggcaatgactgcgcgtcgttcctggcaactgactctggataatggtatccagctaaagctgggaagaatggatacaacaggccgtattaaacgttttatcgagctttatccgctgttacagcagaacacagagaaaagggtagattacgtggatttgcgttatgacagtggtgccgcggtaggttgggcgcctttacccattggtgatcctaatgctccggtcaaaaggcaataa

SEQ ID NO: 10155 - DNA, 1257 bp, Photorhabdus luminescens
atgatcaaatcgacggacagaaaattagtagttggcctagagattggcacagcaaaggtatctgcccttgttggtgaaattctgcccgatggtatggttaatattatcggggtgggaagctgtccatcccgcggtatggataaaggcggtgtaaacgacctggagtcggttgttaaatgtgtacagcgggctatcgatcaggctgaattgatggcagattgtcaaatttcctctgtttatctggcgttatctggaaaacatatcagttgtcagaatgaaatcgggatggttcctatttccgaagaggaagttactcaggaagatgtagacaatgttgttcatactgccaaatcagttcgtgtacgtgatgaataccgaatactgcatgttattccgcaagaatatgctatcgattatcaagaaggtattaaaaatccggtggggctttccggtgtgcgtatgcaggctaaagttcacttgattacctgtcataatgatatggcgaaaaatattgcaaaagcggttgaacgctgtggtttgaaagtcgaccagcttattttttccgggttggctgccagctatgctgttttgaccgaagacgagcgtgaattgggcgtttgcgtggtagatattggcggcgggacgatggatattgcggtgtataccggcggagcgttgcgtcataccaaagttattccttatgccggtaacgttgtcaccagtgatattgcttatgcctttggtacgccaccaagcgatgcagaaacgataaaagtacgccacggttgtgcactaggttcgttggtcagcaaagatgaaagtgtggaggtacctagtgtcggtggacgcccaccacgtagcttacagcgtcagacgttggctgaagtcattgagccgcgttacatcgaattactgaatttagtgaatgatgaaatcttgcgattgcaggaacagttacgccagcagggggttaaacaccatctggcggcgggtattgtcttgactggcggtggtgctcagattgatggtttggctgaatgtgctcagcgtgtgttccatgctcaggtgcgtatcggccaacctcttaatattactggtctgacggactatgcgcagcaaccctattattcaacagcggtagggttgctgcattacggaaaagcctctcatcttaatggtgatgcggatattgaaaaacatgtttcagtgagccgttggtttaagagagtcagtagctggctgaaaaaagagttttaa

SEQ ID NO: 10156 - DNA, 1161 bp, Photorhabdus luminescens
atgtttgaaccaatagaattaaccaatgacgcggtgattaaagtcatcggcgtcggcggtggcggcggtaacgctgttgagcacatggtgcgtgaacgcatcgaaggtgttgaattctttgcagtaaatacggatgcccaggcattgcgtaaaactgctgtcggccagactatccagattggtaatggtattactaaaggtttgggggctggggcaaacccggaagttggtcgtactgctgctcaagaagatcgtgatgcattgcgcaccgcacttgatggtgcagatatggtatttatcgctgccggtatgggtggtggtactggtactggcgcagcgcctgtggtagctgaaattgcaaaagagcttgggattctgacagttgctgtggtgactaagcctttcaatttcgaaggtaagaagcgcatggcgtttgccgaacaagggatcactgaattgtctaagcatgtagattcattgattactatccctaacgacaaactgttaaaagtgcttggccgcggcatttcactactggacgctttcggcgcagctaatgatgttttgaaaggtgcggttcagggtatcgctgaactgatcacgcgtccaggtctaatgaatgttgactttgctgatgtgcgtaccgtgatgtccgaaatgggctacgccatgatgggttccggtattgcgcagggcgaagatcgtgcggaagaagctgctgagatggcgatatccagcccattgctggaagatatcgacttgtcaggcgctcgtggtgttttggttaacattactgctggctttgatctgcgtttggatgagttcgaaacagtgggtaacacgatccgtgcatttgcatctgataatgcaactgtcgtgatcggtacctctctggatccagacatgaatgatgagttgcgggtgactgtggttgccacgggtattggtatggataaacgtcctgaaattacgttggttaccaataaatcttctcagtcaagcgtaatggaacaccgtcatcagcaaatgtctggcggtatgtcttcattgtctgaagaaaataaaccagcagcaaaagtggtgaatgaccaaagcgtacaaacgagtaaggagcccgattatttggatattcctgcatttttgcgtaaacaggccgattaa

SEQ ID NO: 10157 - DNA, 933 bp, Photorhabdus luminescens
ttgcgagataaaacgatgatcaaacaaaggacacttaaacgtattgttcaggcgactggtgtcggtttacataccggtaaaaaagtcacactaacaatgcgcccagcaccggctaacaccggggtcatctatcgccgtactgacttgaatccaccggttgattttccggcagatgcaaaatccgtgcgtgatactatgctctgtacttgcctggtaaatgagcatgacgtgcgaatctcaacggttgagcacctgaatgcagcgcttgcggggttaggtatcgataatattattatcgaagttgatgcgccagaaattcccattatggatggtagtgccagcccatttgttttcctgctgctggatgcgggtattgaagagctgaacacatctaaaaaattcctgcgtattaaggaaaccgtgcgcgttgaggagggtgataagtgggcagagatgacaccttataatggtttcagtctggatttcactattgatttcaatcaccctgcgattgattcaagcactcaacgttactgtctggatttctcggcagaggcgtttgttcgtcaaatcagtcgtgcacgtacatttggctttatgcgtgatattgagtacttacaatctaaagggttgtgtttaggtggcagctttgattgtgcgattgttgttgatgactatcgtgtgcttaatgaagatggcttgcgttttgaagacgaatttgtccgccataaaatgctggatgcaattggtgatctgtttatgtgtggctataacatcattggcgcatttactgcgttcaaatctggtcatgcgttgaacaataaactattgcaggcagttctggcgcaagaaagtgcatgggagctgactactttcgaagatgaagctgaaatgccattggcttttcgtgctccatcaactgtaatggcataa

SEQ ID NO: 10158 - DNA, 528 bp, Photorhabdus luminescens
atgcgcgatagccgcccacaatcattagatgttctttttgaagacgccgccgccgttgagaaaagcccgcttcatgttatccagcaacgtgccgtcgctttgttaaaacttaaccgtgccgttatcagcttgcttcccgcacaattacatccgtggtgccgggtcgctaattatcgcaaacaaattctggtactggaagcaggaaacgccagttggatgaccagattacgttacgagctgccaacgctgctttctacactaagaagcggaattctaccatcattgtcatctatcgacatcaggattaacccatcactcatgattaagcatggcaatagtgcgcagagcttcgcaaaaacgatgagagatgatcataaaactttaccgacacgtcagttaagtcaagagagtgcgaaagaattaataacgctagcgaaccgtagtccaaaaaagctgaaggaaagattagaacgactagctgcactggccggagagagtgccagtacagctaaaacgactaagcgataa

SEQ ID NO: 10159 - DNA, 459 bp, Photorhabdus luminescens
gtggttgcggcaagtattggcgctcctaccattttagcgggtgttaccgataatatctcacaagctaatacctcgcctagtcagagctggcaaaatcaggctttatcggcttttgataatctattttcattgcagaatgttcaacaccagccagccaatggcgttaattactggcaacaacatgctgtacgtaacgtgatcagacagctttcttttgctttttctatttcgcagcctatgagcgatgaaacagcaaaacaaagtatccggttaagttcttccaatattcagcagcttgtgctggaaaccctgaatacactattaattcgggaacctaagccacctgagccggttttagatataccgttcctgaatgttgcatcacaatcttcttatattctgacgctttggattgctaaagcccaaggtatccgtgcaggtcctactgcttacctctga

SEQ ID NO: 10160 - DNA, 2712 bp, Photorhabdus luminescens
atgctgattaaattattaacaaaggtttttggtagtcgtaatgaccgtacattgcgtcgtatgcgtaaagttgttgatgtcatcaaccgcatggagccagagtttgaaaaattgtctgatgatgaattgaagggtaaaactgccgaattccgtgcccgtttagaaaaaggcgaatcgttggaaaatctgttacctgaagcatttgcaacagtacgtgaagcaagtaagcgcgtgtttgctatgcgtcatttcgacgttcagttactgggtggtatggttctgaatgaacgttgtattgcggagatgcgcactggtgaaggtaaaacactgacagcgactttgcctgcttatttaaatgcattaactgggcgtggtgttcacgtagtcactgtgaatgattatctggcgcaacgtgatgccgaaaataaccgcccactgtttgaatttctgggattgagtgttggtattaacctgccaggtatgccggcacccgttaaacgccaggcatatgctgcggatattacctatggtactaacaacgaatatggctttgactatctgcgtgacaacatggcatttagcccggaagagcgtgttcagcgtaagttacattatgcgctagtggatgaagttgactccattctaatcgacgaagcacggacgccattgattatctctggccctgctgaagatagttctgagctttatatcaaagtcaataagttgatccctaaattgattcgtcaggaaaaagaggattcagagactttccagggagaaggccatttttctgtcgacgaaaagtcccgccaggttaacttgacggaacgcggtttagttttgattgaacaattactgtcagaagccagcttgatggaagaaggtgaatccctatattcgccaaccaatatcatgttaatgcaccatgttacagccgcactacgtgcccatgcactgtttacccgtgatgttgactatatcgtgaaagatggtgaggtcattattgttgatgagcatacgggccgtactatgcaggggcgtcgctggtctgatggattgcatcaggctgttgaagctaaagaaggtgtagaaattcagaatgaaaaccaaaccctagcttcaattaccttccaaaactacttccggttgtatgaaaaactggcgggtatgaccggtacggcagatacagaagcgtttgagtttagctctatttataagcttgataccattgtggttccgacaaaccgtccaatgatccgtaatgatttgccagatctggtttacatgaccgaagctgaaaaaattgaagctatcattgaagatatccgcgaacgtaccggtaaagggcagccggtattggtggggactatttctattgaaaaatctgaactggtttcccgtgaactgactaacgcgggtatcgagcacaacgtacttaacgccaaatttcatgcaatggaagcggacattattgctcaggcaggtcaagcgagcgcggtaaccattgcgactaacatggcgggtcgtggtacagatattgtgctaggcggtagttggcaggcagaaattgctaagctgaccgagccaacagaagctcagattgaagagattaaagctgcatggcaggaacgtcatgatagggttctggcggcgggtggtttgcatattatcggtacggagcgtcatgaatctcgtcgtattgataatcagttacgcgggcgttccgggcgtcaaggggatgcgggatcatcccgtttctatttatcaatggaagactcactgatgcgtatttttgcctctgatcgtgtcactagcatgatgcgtaaactgggtatgaaaccgggtgaggcgattgaacatccgtgggtaaccaaagccattgccaatgctcaacgtaaagtagagagccgtaacttcgatatacgtaagcaattgctagaatacgatgatgttgctaacgatcagcgccgtgctatttatgctcagcgtaacgacttgttggatgtgagtgatgttagtgaaaccattggtagcattcgtgaagatgtatttaaagcaaccattgatgcttatattccccctcaatctctggaagagatgtgggatgtggaaggtttgcagcaacgtttagtgactgatttcgatttagagctgccgatcaaagagtggttggataaagagcctgagttacacgaagagacgttgcgtgagcgtatccttgaacaggctgttgaagtctataaacgcaaagaagagattgttggcattgaaatgatgcgtaatttcgaaaaaggtatcatgttgcagactctggatatgttgtggaaagagcatctggctgcaatggattacctacgtcaaggtatccatctacgtggttatgctcagaaagatccgaaacaggaatataaacgtgaatctttcgctatgtttgcaagcatgctggaatcgctgaaatatgaagtgattagtacattgagcaaagttcaagtgagattgccggaagaagtagaggcattggagcaacagcgccgggcggaagctgaacgcttggcaaagcaacagcaattaagccatgaggttgaaaaaggcgcattgatgtctacaacagaagctcagattgccagtggagctcgtaaagtagggcgtaatgatccttgtccttgtggatcgggtaaaaaatataaacattgccacgggcgcttgcagtaa

SEQ ID NO: 10161 - DNA, 393 bp, Photorhabdus luminescens
atggaaaagaaacacctacatatagccgctgggattatcagaaatacgcaacatgaaatttttattactcagcgtcatgctgatgcccatatggggggggtctgggaattccctggtgggaaagttgagcaagaagaaacgcctgaacaggctttaatacgtgagttacaggaagaaattggtattacagttattcattatgatctggtaaaaacggttgaacatgattttcctgacaggttgattaccctgtatttcttcttggtggatgaatgggaaaatgagcctttcggtaaagaagggcaactttctcggtgggtattacagaaagatttaattgctgatgaattcccgcctgctaaccgcagcattgttgcattacttaccgcttga

SEQ ID NO: 10162 - DNA, 198 bp, Photorhabdus luminescens
atgtctgaattactcacgattgaatgcccaacatgtggtaaaactgtggtttggggagaaataagcccatatcgcccattttgcagtaaacgctgtcaattaattgacttaggccagtgggcaaatgaagagaagcggataccaagccaaagtgaaaactctgatagtgatgattggagtggacaacctgagcaataa

SEQ ID NO: 10163 - DNA, 753 bp, Photorhabdus luminescens
atgagtgacacaacttctacaatcatttttgaacatccactgaatgaaaaaatgcgagcatggttgagaattgaatcttccctacaacaactcacaagtcaacgccatttaaactcattggcaagcagcctcgcctttttccgcacaataactgagttacttgaagtgctagaacgcggggaagtacgttcagaattgctaaaagaattagaacgtcaacaggcaaaattaaaacaatgggctgaaatacccgatgttgatataaatatcgtcaatagtttcagattaaaattgaaagagcgggctattgcattaagtaaagcaccacgattagggcaatcccttaaagaagataaaattatcagcctagtgcgccagcgcctcagtattcccagtggttgttgtggttttgatctacccaccctacatctatggcttcacttaccacaatcagaaagagataaaatggtcgcattctggattgatagtttgctacctctccaacaagccctggacagtattttagaactcatccgccaatctgctatttttcgttcagaaatcagtaaaaacggtttccatcagaatacagcagaaggcgcagatttactgagattacgtttgccattaacccctttattgtttccccaaatttccggtcataagacccgctttgctatccgttttttaccattggatagtgaaaaaggctccgtgcctgctcatttaccatttgaattggcatgctgctaa

SEQ ID NO: 10164 - DNA, 624 bp, Photorhabdus luminescens
atgacttatattattgcactcacaggtggaattggcagtggtaaaaccactatcgccaatgcttttgctgcgcttggtgttcctcttgtcgatgcagatattattgccagagaaatcgttgttcctggaacgcccgctctacaagccatcacagaacactttggtcatgacatattgacacccgatggtaaccttaaccgagcactgttacgccagaaaatattcacaaacaatcaagaaaaacagtgggttaatcaacttcttcaccctctaatacatcaagaaacccgacggcaattagaacagataatagcaccttatgttatttgggttattccattattagtcgaaaataatttaaggcatctggcagatcggattttagtcgttgacgtttcacctgaaatacaaatcagccggatagccactcgtgatggtattaactaccaacaaattgaaaatattttggcggcacaggcatcccgtagcgagagactggcttatgccgatgacattatctcaaatcatgataacgtacaggcaattactcctcgtgttgccgaattacatcaacaatacttaagattagctgaatcagccagacaggacaatcatgatgagtga

SEQ ID NO: 10165 - DNA, 1200 bp, Photorhabdus luminescens
atgaaaattcattatatttataattggcaagcagtgaacaacaaaggcgaaatatcaaaagggaaatcactatgtgataacaggaaagctttatatcagcagcttattcattctggattgcaaccttataatataaaatgtgaaaaattgatattttatcatcatcaacaaattgcctaccgtttgaatttcattcgtcaattggcaacactattatcatcaggaatgccattactgaattgcctcaatattcttattcgcgaatgcgctcatccattatggcattgtgtattattagatattagcaagaaaattacccgtggagaatcattttcctcctcattaaaaaattatccatttctattcccacctttattttgtcaacttatttctgttggtgagttaaccgggcaattagaagtctgctgtcaattattggttaaacaacaggagcaacaagataagttacagaagaaaataacaaaagcgctacgttatcctctgattattaccattgttgccagcatcattattttattgatgcttatttttgttttacctgaatttgaacatatttatcattcatttgatgcacaacttcctctgctcacccgcagtttattaatcacttccaactggctgattcaatacggtggctatggtgttattggattaattctactgcttctattttatctacaattacgtcaacgccatacaatatggattactcgtgaaaaaaatctaatgttacgtttacccgttattgcaaaattaattagttgtcagcaattaggacaacttttccatattctgtttatgacacaaaaagccggcctgacactcaccgcagggttagacagtgctattgcatcaataaatcatccggtatttttgcaagcgactaaattcttacgagctcaaattaatcaaggggtaccaatgagcgaaacactgaaacaacaatcttgttttcctgctctgtgtcaacagtttgtcagtgttggcgaagaatctggcaatctggaactgttattaggaaatcttgctaattggtaccaacaacaagcattggagatttctgataatatgacacagttactagaaccaatacttatagtcataatagcgattattgtcggtacgctattgctggcaatgtatttacccatttttcagctaggtacgatactcacctaa

SEQ ID NO: 10166 - DNA, 1443 bp, Photorhabdus luminescens
atgaactcactttcagcaacggaaaatacattaatggaaaaagaaattcatgatatttgtcaacgccaccaatctgttgtgataaaaaaagatgataatacgataacaattgccagcagcgaattacccaatgatgatttattatcagcattacgctttatttccggatgtattgttaatgtagaaatttggccactggcaaggatcgaatcagtattacatcaaaatatttcactgagtcatgtaccagaggaagaatcctctctattaccacttaaaactgatatcaatacagatgaaaatgatgcccccgtcattcaacttattaatcaaactttattaactgcaattcaacggcgtgcatccgatattcatttcgagccattccaacaaggttaccgtatccgtatccgagttgatggctcattacacttattgtcttcgccatcttatcaaatgaatgcaagcattgccgcacgccttaaaataatggcgaaattgaatattgctgaaaaacggttacctcaagatggacaatttgattggtttgacacccgacacaactatgctatccgtatggcaactttgccaaccatacacggagaaaaagttgtgcttagaatattaaatacaatgcagcaattatcgttagatcaattaggtattcctgacccattattaaatcagctccgacaaaaactcgcattaccacaaggaatgattttagtgactggcccaacgggtagtgggaaaaccgtaactttatatagctgcttacaatatctgaatcagaataaaaagaatatttgcagtgtagaagatcccgtcgagatcccactgaatggcattaatcagacacaaactaatagcaaaatcgagctcaattttgccaaagtattacgggcattactacgccaagatcctgatgtcattatggtgggagaaatacgtgatggcgaaacagctgaaatttcagtaaaagcggcacaaacaggtcatttggttctttctacattgcatactaattcaaccatagatacattatcgcgcctacaaaatctgggtatttcaggttatatggctgcttcttgtatcaaattaattatcgcccaacgacttgtcagaaaattatgtcttcattgccgtaaacaacaaacagaagaaaccgttattaatattgaaaacaattctctatttattaatcaatggttagcagttggttgtgaacattgtttctccggttattatggccgaacggctatttatgaatttttagaaataacttatgatattcaacaaatattatcagaacagaatcctaaaaatgttcaaaacaccattatggctcaaagaaaagacactttactttcatccggtattttattagtggaacaaggcatcacgacattagaagaaatttatcaagtcacaggtcaggaatag

SEQ ID NO: 10167 - DNA, 423 bp, Photorhabdus luminescens
atgaaacaacaaggatttactttaatggagatcatggttgctattgctatcatttccatcttaagtgccattggtattcctagttatcaaggatatatccagaaagccgctttaacagatatactacaaaatattgtaccttataaatcaggtatagaactttgcggttttgaaactgaagatttcaatggttgcaacgcaggagcagtgtcaattccaaaagaacataacagcagatatatcgataacatttcagttaaaaatggggaagttaccattaacggtaaacagagtcttaaaaacctcagcgttacattaaagccgacacaaaatacacaaacaggtataattaaatggaatattaaatgtgaatcgacaaacaattcattaaaaagtcgttgtcaggaaatatttgaattttaa

SEQ ID NO: 10168 - DNA, 891 bp, Photorhabdus luminescens
atgacaaaacaaaattgcaatacggatcagcgccgtgctgttcttatggaacacttgcaaaacgacattcctgccagtgtaaccctcgcactaaaagaagatctgggtggaaatacaaatttcaccgctgatattaccggccaattaattcccgcagataaacaagccaccgcagtcattatcactcgggaagatggcattttctgtggacaacaatggctgaatgaagtttttactcaattaggcgaccagatctccattgaatggttagtcaaagatagtgatgcaattacagccaaccaaaaactttgcctattacgaggcccagcacagatattactgaccggtgaacgcaccgcccttaactttattcaaactctctctggcgttgcaacggaagtcagtcattatgttcactgtcttaccggtttaaaaactcaattacttgatacacgcaaaacgctaccaggattacgcaccgccttaaaatatgccgtactttgtggaggtggtaataatcaccgcctcggattattcgatgctttccttattaaagaaaaccatattattgccaatggctctattaaacaggcagtagataaagctcgttattctcaccctgatgtccctgttgaagtcgaagtagaaacgctagatgaactcattctggcactcaaagctaatgttgatattattatgctagataattttactattccaatgatgaaagaagccgtcgctatcacatcaggtaaagtcgctttagaagtatccggtaatatcaccctggatactttgcgcagctatgctgaaacaggcatcgattttatttctgttggagcactcaccaaacatattagagcattagatctctccatgcgctttaattag

SEQ ID NO: 10169 - DNA, 855 bp, Photorhabdus luminescens
atgactctctttatactgttgttagtgttggcgtgggaacgagtttttaaaatgggtgaccattggcaattagagcatcgtcttgagccattgcttaccggtatgaaatccttttcgttatggaaaagcctgttgatgacgttagcagtcatgttgatagcatggttactgattgaaatattaaatgattttatgttcggtgttcttgaactggtgttatgggtgttcatttgtttgctgtgcatcggagcggggcgcttacggcatgactatcgtgaatattttcgtactgttcatcaggataatagggaacaacaaagggaatatcttacgcgtctcgcaattattcatggtttaccctctgatgccagcaaagagaatatgttgcgagagatacaaaatgcgttgctatggataaattttcgctattatctggccccgattttttggttgattgtggcgggtaaattaggtcctgttgctttgatgggatatggctttttgagggcttatcagggatggttggcacaatatggtacaccggttcagcgggcgcaatcgggtgttgacagcttgttgcattggttggattgggttcctgctcgtttggctggcgttgcctatgctttattagggcatggtgaacgggctttaccggcgtgggttgcttctcttagtgatttaagaacttcacaatataaagtgctctgtcagcttgctcagttttcattaagtcgtgaaccccatcttgattcaattcaaactcccattgctgcggtgatactggcgaaaaaagtgactttctctgtcatcgttgtcgttgccttactgacaatttatggggcattggtttga

SEQ ID NO: 10170 - DNA, 201 bp, Photorhabdus luminescens
atgtttactgatgcggccaccccccccttatcactcaagaacgcaagatacgttaaacaaaggaacgataactacacggcatcgacacaagtttctgttgtaccagttctgttgaaaactgacggtgccggagggctagctcaagctgttgcggttatttcagtatggtcggatattgacttcatcgaaccctcttcttag

SEQ ID NO: 10171 - DNA, 987 bp, Photorhabdus luminescens
atggcaacaaaaacttcatttccgcctgcactgcgggaggataaccaacacgcgcccggtcaaccaggcggtttctggccccgtccggtatacctatgtctgctgtgttcactgacggcaacgaccctgcccgcctcggcgcgggaatactttaatcccatgttcctaatgggcgctgatggtgaacacagtcatgtcgatctcttggcgtatgaaaacgcgagatatgtcgcacccgggcgctatctggtggatgtctacatgaaccagaataaggtggacagccgcgagattgaattcaggctggttaacggccatctccagccggtattcaccgtcgcacaactggaaaggtatggggtcaatactcgcgagttaccggcttttcagggtaaagcggatgacagccccatcaccgagctgacgaaacagatcccgcacgcccgcgtgacattggattttgtccgtttacgtctcgatctcagcgtccctcagagcgccatgcagccccgttattctggaacggttaacccgtcactgtgggatcctgagatcccagcttttttgatgaactacaccgtcaatggctcggaaaagcattatgacaatcagggaaactgggaaggatcacgttctcgtaatctgtttgcttcttttcgtaatgggctgaatctgggactgtggcgtctgcgcagcccgcaaacctacagttacaatcatcagcgccacgaggacgcctcctgtttttccgcgccgacacagacccaatggcaggtgaacaatacctacctgcaacgtgacatcccagcactgcgcagtgagttcacggcgggtgaaacctataccggtggcgatattttttacagtatcccatttcgggacatgaaactggcttcggaggaggcgatgttacccgacagtcagcacggttttgccccggagataaccggtgtggcgaactccaatgcgcaggtgacggtattctag

SEQ ID NO: 10172 - DNA, 138 bp, Photorhabdus luminescens
gtggcgggaaacgtgggatttggcctgcgctatcaattaccgggaggcgggctagggagctacctgaaaaatggcgattatggcgaaaaccgccccggcgtttgtggggacagtcaggatcgccacgtcccgttataa

SEQ ID NO: 10173 - DNA, 216 bp, Photorhabdus luminescens
gtgagcctttatcagacggacaacactcgctggtctgctttgtaccgtcctcttcccggggcaagttcaaacacggcagaactgactctggcattaacgctggaacagccaacctgtgaactcaacgtgcagacatcccacgtcgagtcttcacccataccgcttaacgaagtacagaacatatcgaagcagcggacaacaagcctattacgctag

SEQ ID NO: 10174 - DNA, 717 bp, Photorhabdus luminescens
gtgaaaagattgatgacagcgatgatgatggccggcctgttaggctgcccgatcacttccacacaggcggagagggtggggattgatgccacccgcattatctaccgggcggatagctacgctgcaaccgctttgctacgtaatagcagtaaagaggccgtctatctgatgcaggtgacggtcagttctatccctgatgggagcaagactgcgccatttttagtgactccccccctgtttcgtatggaacccggcagccagaatcaggtgcgtatcatcaaaaccggccaggcgctgcctgctgaccgggaatccctgttctggtttaccgcgcaagctatcccgttaagcaccgaatccaataatctctctagtaagcagagctccgggggcgtacaagttctggctaacacaattaaattgatgtatcgcccgtcagggctgccggttgcaccggaaaagggcttcggcgctttgcgcttcaaaacgacagccgagggaataacgatcacgaatccatcaccctattacatcaccttcacctccctgaaagtaggcggacaagagctgatgacaaagcaacagaaagagaacatggtctcaccgttctcgaccctttttttacccctcaaaggggtgcattacccggctaaagtgagttggacggtgattaatgaccttggaggaggatctacctatcagggggagataccgtaa

SEQ ID NO: 10175 - DNA, 195 bp, Photorhabdus luminescens
gtgtatgacgggaataccgctgttactaaggcagctcctattgttatcgctgataccacagaattcgagccaaccagtccaaaagatggaaaaggcatgaaaaaatgcaaaatggcgctggtttccaagtccagcgccgtaccagcagcccaagaagtaatagcaccagtaacattccaagtggtttataaataa

SEQ ID NO: 10176 - DNA, 387 bp, Photorhabdus luminescens
atgtatgaaatgaaaaagcaaatgatgaagaccaacatattagccgcagtactcctaagcatggagataggtatggcacacgcttcagatggcgctacggtcaacgtgatggcctccataggcgcctcgacccctgatctcaacgtcgaaggtacgggcattgttggtagtaaaggtgcttacactttagatatgggaacagttagaacgtcagacattagtgctgacatcaatagcgctcattcatcaggaaaagagttagaggttaaactagctaactgtagttccaaaatgggaaaaaccataagcaatgctaaatcactccttcacaagatattcaaatacaggttttggaacagactcttactaacagcaaccagatcttaa

SEQ ID NO: 10177 - DNA, 144 bp, Photorhabdus luminescens
gtgatgtggctttcaatgacatcagtttctgatatgggacaaaaaaccgaacatttagagttattttgttcggtcttcttcaaacgcgggggagtatacggaaaatttcatcacttaaaagagattttttgtatttttttgtaa

SEQ ID NO: 10178 - DNA, 579 bp, Photorhabdus luminescens
atgtgtgataaacaggagtttgtaactaatcccagaatcaagctactcagctttctggctattattattgcttccattatggtaattggtgatttggggttccatattgcatcttggtcgttatggcacgataccactcgtcaggccgttcttcaggcgtatagcgatcttatgcctgcattaactgcaaaaggatttaagcaatctttattaagtcaggtgctttatatctctctggatacgatacctcggattatatcaacgtcatcttatatattaattggcattctgtttttccggtttgctaaaggtgaaatatggagtaaccgtaatatttccgcttcatttattattggtttcctgatgattctagagcaacttctctaccctgtgattaatatgttacaaggaatggcgttatctgtggatttagtgaaagggcaacgggtatttagtttttcatttggcgttaattcagaatctctgtttattattatgtttggtgtattccttctgatatttagcttaattatgcgtgaatctaagaagataagcgatgagcaacgttattttatctga

SEQ ID NO: 10179 - DNA, 222 bp, Photorhabdus luminescens
atgagtattataataaggttggatgtgatcttagcaaaaaggaaagtaaagtctaaagaactggctgccattattggtattactgagcagaatttatcattgctgaaaaatggcaaaataaaaggtatccgtattgagacgctggaaaaaatttgtaaacatttgcagtgtcaacctggagatatattggaatatgtggaagatggagaggataaccgctaa

SEQ ID NO: 10180 - DNA, 348 bp, Photorhabdus luminescens
atgatctctctttttatatggttttcatttaagttaaatttttataaaaacagcaattcaaggatgttaacaatgaataaattttttattgttttattctcaatatttgtgattacaggatgttcttctatgccacggcttactgatggctatatttcaacctgtggttattttgaatgtaatgtcaaggatatagtttcaggtagtgaagttaaagtagataatataccttctactcctgatatttaccgggatatctcaatccaagatagacaaattatacaatctggtggaagaccaccttttgaagataagagttacagtattggggggacttttaaattctaa

SEQ ID NO: 10181 - DNA, 315 bp, Photorhabdus luminescens
ttggcgggttgtacatcgtgggaaaaaccaggggcaactcagtatgaaagagatagggattacgctgaatgtaaagcattaggttattctcaattaccatcagactggaccagcgaagttgttcattctttcgagacaaaacatttttcttgcaaagataaagacaaggacgaagataaatcctgtaatcattacattactgtgccgaaaactgaggttaagcgttgggataaaaatgaatcatcaaggcgttggataatttcatcctgtatgtataaaaaagggtggcatgaagagacgcgttattggttttaa

SEQ ID NO: 10182 - DNA, 765 bp, Photorhabdus luminescens
atggcttataataaaatccgccaaccaaaattatcagatgttattgagcagcgtcttgaacatctcatccttgaaggatctgtgcgtccaggggagaagttgccgcctgaacgtgagttggcgaaacagtttgatgtgtcacgcccttcactgcgcgaagccattcagcggttagaagctaaaggttttctttttcgccgtcagggtggggggacgtttgttcagagtaacctttggcaaagtttcagtgatccactggtacaactactggctggtcaccctgaatctcaatttgacctccttgaaacccgccatgctttggaaggtgttgctgcctattacgcggcactgcgtggaactgacgaagattttgaacgcattcggcaatatcaccttgttattcaacaagctcaggaaagtggtgatgtcaatgctgaatctgaggctgtgttgcaatatcagcttgtcgttgccgaagcagcgcataatgtggttctccttcatttattacgctgtatggcacctatgctggaacaaaatatccggcagaattttgagtttttgtatacccgccgagaaatgttgacggctgtcagcgatcatcgggcgaagatttttgcagcgataatggcgaggcaaccagagaaagcccgtgaggcctcccatcgccatttagcgtttattgaagatgtcttattggatctcagccgcgagcacactcgccgcgagcgatcattacgatgtcttcaacagcatcaggaataa

SEQ ID NO: 10183 - DNA, 2664 bp, Photorhabdus luminescens
atgtcagacattttgaaaaatgacgtggatccgatcgaaactcgcgactggttacaggcgatcgaatcggtcatccgtgaagagggtgttgatcgtgcccagttcttgattgatcaggtactgaacgaagcacgtaaaggtggcgtgaatgttgcggccggtgctgctaaccgcgattatatcaacaccattgctgttgaggatgagcctgcttaccctggcaatctggatttggagcgtcgtattcgctctactattcgttggaatgctgtgatgactgtgctacgggcatctaaaaaagatctggaattaggtggtcacatggcttcattccagtcttcagcaaccatgtatgaagtttgtttcaaccatttcttccgtgcccgtaatgaaaatgacggcggtgatttggtttatttccaaggtcatatctctccaggtgtctacgctcgtgctttccttgaaggccgtttaactgaggagcagatgaataatttccgtcaggaaattcatggcaatggtctctcttcttatccgcatccaaaattgatgcctgaattctggcagttcccaactgtttcaatgggattggggccaatcggtgcgatttatcaggctaagttcctgaaatatctggaacaccgtggtctgaaagatacctccaagcagaccgtttatgccttcttgggtgatggtgaaatggatgagccagaatccaaaggtgcgatcactatcgcaacccgcgagaaactggataatttggtatttgttatcaactgtaacctgcaacgtttggatggtccagttacgggtaatggcaaaatcgttaatgagctggaaggcatttttgatggcgcaggttggcaggttattaaagtgctttggggcgatcgttgggatgaactgttgcgtaaagataccagcggtaaattgatccaagtgatgaacgaaacgctagacggtgattaccagacattcaaatccaaagatggcgcttatgtgcgtcagcatttctttggtcgttacccagagaccgctgaattagttaaagatatgaccgatgaccagatttgggcgttgaaccgtggtggtcatgatcctaagaaagtctttgctgctttgaaaaaagcgcaagaaactaccggcaaaccaacggttatcctggctcagaccatcaaaggttacggtatgggtgatacggcggaaggtaaaaacatcgctcatcaggttaagaagatgaatatggaaggcgttcgccatttccgtgatcgttttaatgtacctgtggctgatgatcaactcgaaaagctgccttatgtgacgtttgataaagactctgaagagtacaaatatttgcatgagcatcgtgcagcgctagggggttatctgccaagccgtcgtactcattttgaagagaagctggaactgccaactctggaagattttggtgcgttgctggaagaacagaacaaagagatttctaccactatcgcttttgttcgtgccttgaacgtgatgttgaagaacaaatcaatcaaagatcgtctggtgccaatcattgctgatgaagcgcgtacatttggtatggaaggtctgttccgtcagatcggcatctacagctctaacggccagcagtatactccgcaggaccgtgaacaggttgcttactataaagaagactctaaaggccagattctgcaagaaggcatcaatgaattgggtgccggttcatcatggctggcggcagcaacgtcttacagcaccaataacctgccaatgattccgttctacatctactactctatgttcgggttccaacgtattggcgacctgtgctgggcagcaggtgaccaacaggctcgtggcttcctgattggggggacttccggccgtacaaccttgaatggtgaaggtctgcaacacgaagatggacacagccacattcagtctctgactatccctaactgcatctcttatgatccggcatttgcttatgaagttgctgtgattatgcatgatggtttagagcgtatgtatggtgagaaacaagagaacatttactactacatcaccacgctgaacgaaaactaccacatgccggcgatgccacaaggtgcagaagaaggtatccgtaaaggtatctataagctggaaagcttggaaggcagcaaaggtaaagttcagctattaggttctggttctattctgcgtcatgttcgtgaagcggcacagattctggctaacgattatggtgtgggttctgatgtgtacagcgtgacctcattcactgaactggctcgtgatggtcaggattgtgaacggtggaacatgttgcacccaacagaaacgccacgtgtaccttatgttgctcagatcatgaatgaagcaccagcagtggcttctactgattatatgaagttgttcgcagaacaaattcgtaacttcatccctgcaagtgaattccgcgtattgggtactgacggtttcggtcgttccgatagccgtgaaaacctgcgtcatcattttgaagttgatgcttcttacgtggtagttgctgctttgggtgaattggctaagcgcggcgaaatcgctgtgagtgttgtggaagaagcaatcaacaaatacaacattaacccagaaaaagttaacccgcgtctggcataa

SEQ ID NO: 10184 - DNA, 1599 bp, Photorhabdus luminescens
atggctatcaaaattaaggtaccggatatcggtgcggacgaagttgaagtcaccgaaatcatggtgaaagttggcgatacagtggaagctgagcaatcgctgatcaccgtggaaggtgataaggcttcgatggaagttccatccccacaggcgggtgttgttaaagagatcatcattgcggttggcgataaagttgaaaccgacaaactgattatgatttttgattccgcggaaggtgctgtagaagctgcgccagcggaagcgccagcagcggtaacattgtcttcgcgtatggcagagccagaacccgtagcttctgcggctatgaaggttcatgtaccggatatcggcggtgatgaggtcgaagttaccgaagtgatggtgaaagttggcgatgcagtggaagctgaacaatcgttgatcaccgtagagggcgataaagcctctatggaagtccccgcgccattcgccggtatcgttaaagaaattcaaatcaaagccggtgataaagtggaaaccggttctatgatcatggtattcgaagtcgcgggtgcagcacctgttgctccggttgcctctgcgccagctccaactgctgaaccagagaaagcagcagtaccggttattgctagcagaagcttcgcagaagaagacaaaaatgatttcgctgaaaatagcgcttatgttcatgcaacgccggtgatccgtcgcctggcgcgtgaattcggcgttaacctggctaaagtgaaaggtacagggcgtaaaggccgtgttctgcgtgaagatgttcaggcttacgtgaaagacgcggttaaacgtgcagaatcggctcctgcatcagccggtggtggtctgccgggtatgttgccttggccgaaagtggatttcagcaaatttggtgaaattgaagaagttgagctgggtcgtattcagaaaatctctggtgctaacctgagccgtaactgggtggtgatcccacatgttacacagttcgacgaaacggatatcactgaagttgaaaacttccgtaaacagcagaatcaggaagctgagaagaaacagcttggcgtgaagattactccgctagtattcatcataaaagcggtagcaaaagcgctggaagagatgccgcgctttaacagctctatctcggaagatggtcagaaactgacgctgaaaaaatacatcaacattggtgtggcagttgatacacctaatggtctggtggttccagtgttccgtgatgttaataagaagggcatcattgaattgtcccgcgagctgactgagatgtctaagaaagcgcgtgcaggcaaactgaccgcatctgatatgcaggggggatgcttcactatttcaagtctggggggtatcggtggcacagcattcacgccaatcgttaatgcaccagaagtggctatcctgggcgtatcccgctcatcaatgaagccagtatggaatggtaaagagtttgttccacgcctgatgctacctctgtcactctctttcgatcaccgtgtgatcgatggtgctgatggtgcgcgtttcatcacatttattaatcatgcgatgagcgatatccgccgtctggtgatgtaa

SEQ ID NO: 10185 - DNA, 1431 bp, Photorhabdus luminescens
atgatgagtactgaaattaaagcccaagtagtggtacttggggcaggtccagcagggtattctgctgcttttcgttgcgcggatttaggtttagaaaccgttctggtggaacgttactctaccttaggtggtgtttgtcttaacgttggttgtatcccttccaaggcattgctgcatgtagcaaaagtgattgaggaagctaaggcgctggcagatcatggcatcgtttttggtgaacccaaaactgacatcgaaaaagtccgtgtttggaaagaaaaagttattaatcagctaaccggtggtttggctggtatggctaaaggccgcaaagttaaagtggttaatggttttggtaaatttacaggggcgaacacgctggttgttgaaggtgaaggtggcgcaacaacgattaattttgataacgccattattgccgcgggctcccgtcctatccaactgccatttattcctcatgatgacccgcgcgtttgggattctaccgatgctttggcgctgactacggttcctggccgcttgttggtcatgggcggtggtattatcggtctggaaatgggaaccgtttaccacgctctgggctctcagattgatgttgttgaaatgttggatcaggttattcctgcggctgataaagacgtggtgaaagtctttaccaaacgtatcagcaaacaattcaatctgatgctggaaaccaaagttaccgtggtagaagccaaagaagatggtatctacgtcacgatggaaggcaaaaacgcaccagcagaaccacagcgttatgacgcggttctggttgctatcggtcgtgtacctaacggtaaaatgctggatgcaggtaaagccggtgttgacgttgatgaccgcggctttatccatgttgataagcaaatgcgcaccaatgtaccgcacatctttgctattggtgacatcgttggtcagccgatgttggcgcataaaggtgttcatgaaggtcacgttgcggcggaagttatttcgggtaagaaacactactttgatccaaaagtgattccatccattgcttacactgaaccagaagttgcatgggttggcctgactgagaaagaagcgaaagagaaaggcattagctatgaaacggctactttcccgtgggcagcttctggccgcgcaattgcttctgattgtgctgacggtatgaccaaattgattttcgataaagaaagtaatcgtattatcggtggtgcgattgtgggtactaacggtggtgaattgttgggtgaaatcggtctggcaattgaaatgggttgtgatgcggaagatatcgcattgactatccatgctcacccaacgttgcatgagtcggtaggtctggctgctgaagtctttgaaggcagtattactgatttgccaaatgcgaaagcgaagaaaaagaaataa

SEQ ID NO: 10186 - DNA, 231 bp, Photorhabdus luminescens
ttgtctgctgttaattcagaatattactatcagttaatgttacttttctgtgaacgaattaacatcgtattcaaattttggtatgctgagcgcccgaagctgggcataacttgttttgcacttgttaagttatgccggcaatcctctgacctggcacccggaaccataactaacaacctgtttcaggaggggctatttgttgcgaaaacacatattgttacgcaaagataa

SEQ ID NO: 10187 - DNA, 2598 bp, Photorhabdus luminescens
gtgctagaagaataccgcaagcacgtagccgagcgtgcagcccaaggtgtcgtccctaaaccattggacgcgacacaagcggcggcgctggttgagttactgaagagtccaccaaaaggtgaagaagatttcctgttagatttgctgattaaccgtattccccctggcgttgatgaagcggcttatgtaaaagccggttttcttgccgccattgtgaaagatgaaaccatttcaccgctaattacgccagaaaaggcggttgagctgcttggaacgatgcaaggtggttataatattcatcctttgattgatgctttggataatgaaaaactggctccaattgcagctaaagcgctctctcatactttgttgatgtttgataacttctatgatgtagaagaaaaagcaaaagcaggtaatccacaagccaaacaaattatgcaatcttgggctgatgcgcagtggtatctggaacgccctgaattggcagaaaaaattacagtcacggtatttaaagtgacgggtgaaacaaacactgacgacttatctcctgcgcaggatgcatggtcacgccctgatattccgctgcatgctctggcaatgttgaaaaatgctcgcgaagggattgtcccggatcaagctggtgttattggtccaatcaaacagattgaagagctgaataagaaaggctatccgctggcttatgtcggtgatgtggttggtacaggttcttcccgcaaatcggccactaactcagtattatggtttatgggcgacgatattccctttgtgccaaataaacgtggtggcggtgtcgttctgggcggtaaaattgcgccaatcttcttcaatacgatggaagatgccggtgcgctgccaattgagctggatgtgaacaaattaaatatgggggaggtaattgatatctacccatataaaggggaagtacgtcaccacgaaaccaatgagttactggctgaatttgaactgaaaacagatgtattgttggatgaagtgcgtgcgggtggccgtattccactgattatcggccgtggtttgaccagtaaggcgcgtgagtctcttggtttaccccccagtgatgtcttccgtcaggcgaaagcggttgaagaaagtcgtcgcggtttctccttggctcagaaaatggttggtcgggcatgtggcactgtgggtattcgccctggtgaatactgtgaacctaaaatgacctctgttggttctcaggatacaactggcccaatgacccgtgacgaactgaaagatctggcgtgtttgggtttctctgcggatctggtaatgcagtcattctgccatacggcggcttatcctaagccagttgacgtcactactcaccataccttgcctgatttcatcatgaatcgtggcggtgtttctctgcgtccgggtgatggcattattcactcatggctgaaccgtatgctgttgcctgataccgttggtaccggtggtgattctcatacgcgtttcccgattggtatttccttcccggcgggttctggtctggtagcgtttgctgctgcgacgggggtgatgcctttggatatgccagaatcggtgctggttcgttttaaagggcagatgcagcccggtattactctgcgtgatttggttcatgcgattccttactatgcgattcagcaaggtcttctgacggttgaaaagaaaggtaagaaaaacatcttctctggccgtattctcgaaatcgaaggtttgccagatctgaaagttgagcaggcatttgagctggcggatgcttctgcggagcgctctgcggcgggctgtaccattaaattggataaagcaccgattattgaatacctgcaatccaatattgtgctgctgaaatggatgattgccgaaggttatggtgatcgccgtactttagagcgtcgtgtaacgggcatggagaattggctgaaagatcctcaattgttggaagctgatgctgatgcagaatatgccgcagttatcgaaatcgatctggctgaaatcaaacaacctattctgtgtgcaccgaacgatcccgatgatgcccgtttactgtctgatgtggctaacagtaaaatcgatgaggtttttatcggttcttgtatgactaacattggtcatttccgtgcagccggtaaattattggatcaacataaaggtcaattaccaactcgcttgtgggttgctccgccaacgaaaatggatgcagctcaactcacagaggaaggttattacagcatctttggtaagagtggggcacgggttgaaattcctggctgttccttgtgtatgggtaaccaagcccgcgttgctgacggtgtaactgtggtctccacttcgactcgtaacttcccgaatcgtctggggacgggggcgaatgtttacctggcatcggctgaactggcggctgtggcttctttgttgggacgtttacctacaccggaagagtaccagcaatttatggataaagttgatgagactgcggaagatacttaccgttatctcaattttgatcaactgaaccaatacactgaaaaagcggatgatgtgattttccaaaccacggtgtaa

SEQ ID NO: 10188 - DNA, 267 bp, Photorhabdus luminescens
ttgatgagatatattcaaggatcttgtaatagaaaaatttattttctatcttgtcagcaaaaacaaaaacacctttcaggagccattatgatacgccatattcttttgttaaaattcacatccgagataaaacaacaacaattaacgacgataagagataccgctatttccatgcagcatcagatcaaaggcatttcttctatcgagtggggaagtcatgtaagtagtgaaaacaaaaaaaaggttttacacatgctatcaccatga

SEQ ID NO: 10189 - DNA, 231 bp, Photorhabdus luminescens
ctggtgcgttctttccattttaatatttcctggcaattccgcctcaaaatcagcccacaaactgccaagaagtgggagattaaagcctctatgctgacacaacggcatggttttcaccgggataaccgaaatatacacccccaagttattcttgaggtttgtgtccgcgatggctttcatcggaggagagtccagcctcagtgcaaatataggcaaatacactataattaa

SEQ ID NO: 10190 - DNA, 372 bp, Photorhabdus luminescens
atggaatacgaatttttgctggatgtcactggactggtgactagccggttctcgatggatcacgaagctattggtcagtggctgaatgaagaagttaaaggtgatttggcggtgatagataagattgcctcagcgttggccgaaattaaaggtagtgaacgtcaatggcaacttgtaggtcatgaatatacgctgttaatggatgacgaagaagttatggttcgtgccaatcagcttgagtttgaaactgattcgatggaggagggcatgagttattacgataaggagagcctggctttttgcggtaccaaggattttattgatatgttggccgattatcgggattttattttgcaaaagtacgattggtga

SEQ ID NO: 10191 - DNA, 873 bp, Photorhabdus luminescens
atggaagatatcaatctgtctggtggcattaatgaagctacaagttggcttattaatcatcaggatttaatcattcaatatctggtcaatgctgttgctgctattctcattcttgttctgggattgatggcggcgaaactcattagtaagggtgtaaaaagagttatgtcattgcgtggcattgatgtaacggtatcagatttcctggctgctgttgttcgttatttgattattgcgttcactattattgcagttttgggcaaattaggtgttcagacggcttctgtcattgcggttattggtgcggctggtttagctgttggtttagctttacaaggttctttgtccaattttgccgcaggggtattgttagtggcttttcgtccaattcgtgcgggtgaatatgttattctgggcgcggttgaaggcactgttgttcaagtgcagattttctctactacattgcgtacagcagatgacagaattgtcgtgatcccgaatgggaaaattattgcagataatgttattaataccagccgtgaaccgaatcgtcgaacccagattatggtcggtgtggcgtataatgcggatattgacgaagttaaaaaagtattaggcaatgttattgccgcagacaatcgtattcagcatgaaaaaggcgtgacgattcgtttgcatgaaatggctccctcttcactgaattttattgtgcgtgtatggaccaccaatggtgatgcttgggaggtttattgggatttgatggaggactttaaacgcacattggataaacacaatatcagtattccttatccgcaaatggatgtttatttgcatcagaaccaagctgtgtcgcagaatagggtgagcgattaa

SEQ ID NO: 10192 - DNA, 531 bp, Photorhabdus luminescens
atgatggaaaataacaataaaaacactaactttaataaaactgaaatgaataaattcacttttgtagaatcaaaattgagcaatgaagaagtcgttgatatacatgatataatggtgaactcaggagaattaagacctattgaataccttaagttatgccagaatgagattaaagaatcaaagagaatagttatactatgtagtcataatacagagtttgtcggtatggcacatattctcttaatatctgaacgcacatcatttaatgatcagggaattattgaactccatgacctttgggttaatccaaagtggaggagaaatggcatagtacttcctctctctcgcaaagtagaagaaatttgttatcaacgacttaacgtaaaaaatgttggcttggcgatacaactctataaaaacaatgaatatattttgcgattttatatgaaaattgggtataaacccattgatttgcaaatagatggttctaatacagtattatggatgacaaaagaaatagaacctttttaa

SEQ ID NO: 10193 - DNA, 1299 bp, Photorhabdus luminescens
atgaacgaaaaaatagaagtaagaaatatagatgtaaatagcgatatgagtactaattacactaaaaaaagacctaaaatccctcaggaactatacgcatatgaagatataaagaaaattccaatccaagatatcctttctgatgaggaaatagaaatttatgaaaatgaaatgcagaaaaaaataaaagcaaaaccgttgggatctaacaaacttgttgttgttaccaaagcgaccagattatgcaatctaagatgttcctactgccattcatgggctgaagggaaaaataataccatgagttttagcagtttagttgctatgacgaaaaggatcctcgatattcctgatttaattagaattgaatttgtatggcatggcggtgaagttacaagattaagacctgaatttttcataaaattcatttggttacaacaacatattaagagagataaccaattcgttaccaatgcgatacaaacaaatgctgtgaatatcagtgaaaaatggatagcattgataaaaagattgaatattagtgttggaataagtcttgatggtcaccccgaaattaatgatagcagaagagttgatctaaaaggcgttggcacttcgaaaagaatagaaaaaacaatacaaacatttagaaataacaatattaaatatggagggctagttgtcgttgatcggcttattcttgaagcaaataaaagagaactattaagctattttgcaagaataaacctcaatgatcttgtttttctagatatcgttccagataacaggttgcttccaggagagtctccaggtgacagttatgtcaattacttcgaatacatggactttctctcggaactatttctaatttggtggaaggaatataaagacacaattaacattcctttatttaactcatttgttggtgttttgaaaggtgctagtaatgttctgatgtcatgttattggtcagaaaaatgccatcaagaagttgttacaattgagccaaatgcaaccgtatctgcatgtgataaatacgtcggaagcgaaaatttttactatggttcattgctagataatgacttaaaaacattattagagaattctatacattatgaaaaatcagaaaaagaagaaatcactaataataacaacatgaaaaattgccagtggtttcatttatgtcacggtggatgcccacaaacgagaataagtaacaggaaacataataaaatgtactcagatatattagcatgttgcggaactgacaagctacttaatacaatttctggagttttatga

SEQ ID NO: 10194 - DNA, 624 bp, Photorhabdus luminescens
atgttatcgacatttgtgcagggtttttttcttagcgcagcaatgatcttgcctcttggcccacaaaatgcctttgtcatgcagcaaggtagcaggagacaatttcatttgatgagcgcaactttgtgcgcgatcagtgatggttttctgattggtgtcggtgtatttggtggtagtgcattacttagtcagtcaactttactcttgcaatttgtcacctggggaggtgttgcttttttattctggtatggatggggggccttacgtgtggttttgtttgccaatgttgaattggcgcaggtaaataattcagtaaaaaaccgttggcgggtagttgcgatcatctttgcggtcacttggttaaatccgcatgtttatttagataccattgttgttctgggtagtattggtggtcagttatcttcagacctcaggccttggtttacttttggggcggcaagtgcttctgttagttggtttttttctctgtcattgctggctgcatggttttcccctgtgctaagtaagccgctttctcaacggattattaatgggtttatttgtatcataatgtggtatatcgcatggcaacttgctaagcagggattgctaatttctgattaa

SEQ ID NO: 10195 - DNA, 723 bp, Photorhabdus luminescens
gtgaaattaaaatcattggggttggccgccatgttaagtgccggggtgccacttgctgcacaggctgctgatttacccggagtccctcatgttattacttctggtaatgcggtagtgaaagcagaaccggatatagcaacattgctgattaacgtcaatattgcggctaaagatgcttctggggctaaaaagcaggttgatgaactggttgctaagtattttgattttctgaaaaatcacggtattgaaaagaaagatattgatgccgcgaatttgcgtactcagcctgattatgagtacgataatgtatcgggcaaatcggtgctgaaaggctatcgtgcgatccgttcagtggaggtgaaggttcgtaagttagatcaacttaatgatctgctagatggtgcattaaaagcgggtttgaatgaaatcgtatctgttcagtttggtgtggacaatccgcaaaaatatcgtgatgaagcccgccagaaagcgattgagaatgcaattgaacaagctggtgccttggcgaaaggctttaatagcaaagttggctcgatatacagtatcaattaccgagcaccagaggtgattgatcacatgaagtatcgcaatactgatgtgatgatgtcgggaggtgctgctgctggagtgggtgaaacttaccagcaggatagcatcaacttcagcgatcaggttgatgtggtttttgagctcaaaccttaa

SEQ ID NO: 10196 - DNA, 903 bp, Photorhabdus luminescens
atgaaacgccctgactaccgaacactacaagccctggatgcagtgatccgagaacgcggcttcgagcgcgctgcccagaaactctgtatcactcaatccgcagtttctcaacgtatcaaacagttggaaaatctgttcggtcagcctctattggtacgcaccgttcctccacgccctaccgaacaaggacaaaaactactggcactattgcatcaggtagagttgttggaagaacaatggctaggcaatgaacaggggaccgatactccattgctgctttcattagccgtcaacgctgacagcttagcaacctggctgttaccagctctacatccggtactcgctgatttacctatccgactcaatattcaagttgaagatgaaactcggactcaagaacagctaagaagaggtgaagtcgttggcgcagtcagtattcaaccacagcctttacccagttgtctgattgataaactaggcgcactggattatctgtttgtcgcctcaccagaatttgcgacccgccatttcccaaatggggttacccgttcggcgttactaaaagccccagcagttgcattcgaccatctggatgatatgcatcaggcatttttacaacagaacttcgaattatcaccgggtagcgttccatgtcatatcgtcaactcatctgaagcctttgtacaactggcaaaacagggttccacttgttgtatgatcccacatttgcagattgatcaagaattgaaaaatggtgaactgatcgacctgacaccgggtttatgtcagcgccggatgctctactggcatcgttttgcaccggaaagcaggactatgaaaaaagtgactgacgccctgttgaaacttgggcgtcagatgttaagacaagatgatattaattaa

SEQ ID NO: 10197 - DNA, 195 bp, Photorhabdus luminescens
atgcaaaccacctttagctcgatcaaaaattcatcattaagctatcaaaaacagcttcacccagtgctttctcctgagcatatcgcctattcaaccacgtcaacaaactcaaccttcaaaaatggaacccccttcccaaaggcgaccaaccaacaaaaatttatccaaattgggtataacatgcttgatttctga

SEQ ID NO: 10198 - DNA, 555 bp, Photorhabdus luminescens
atgctgtcactgaaacatgttgcacaattaacgtataatactttgcagttatatatggatcagagaggaatagatttggcggttggtcctatctctgacagcgatgcaaacatgctaacaaaagcgtatggtgagcttaactgggaatattatattacagaagtcggtaatcgacatgactgcttcagcttatgcataaaatttgtcgtatcaagggaaaatctccaaattgaatctgctccggctggagtcgctttatcgacatatgatttgaacgataaaagttttaacatccatgtattggaaaattttgtgaaggatatggaaaatcatccgttgcatagaaagatgcttttgtatactctgtatgcaactttgattttcatgaatgtggctgatggtgaagacgtcaggattcatgaacccgttaaggataaaatagcttactatcgctcgtttggttttgagctagagcgttgtgggtatgtcatgtcatgtgatattaagacattaacggcaaagttgaagagtaggtctaaggcgttagttctttga

SEQ ID NO: 10199 - DNA, 162 bp, Photorhabdus luminescens
atgagaacacaaaaagaaccgatgttcgatactattcaaacttataaaaaagctggagagaccttagattttcttatgaaagtaggtccggttttagaagatcatgcacaggcaccaagtcaagaaaagcaaggtcgtcgtcgtaacaaagaggctgcatag

SEQ ID NO: 10200 - DNA, 660 bp, Photorhabdus luminescens
atgactcaggacgaactaaaaaaagcagtaggttgggcagcactcgaatttgttacaccaggaacagttgtgggtgtggggacaggctcaacggcttcacactttattgatgccctcggttccattaaagatcagattgaaggggcagtatccagctctgaggcttctactgagaagttaaaaagtttggggattcctgtattcgattgtaatgaagtcgattcccttgatatctacgttgatggcgcggatgaaatcaatggcaatatgcagatgattaaaggcggtggtgctgcattgacgcgtgaaaaaatcattgctgcaatagcaaaaaaattcgtttgtattgttgatgcttctaaaaaagttgaggtattgggtaaattccctctgccggttgaggtgattccaatggctcgggcttatgttgctcgtgagttggttaaattggggggagtaccaaaatatcgtcagaatgttgtgactgataacggcaatgtgattcttgatgtgcataatctagccatactcgatcctgctgagttagagaataaaattaatcgtatctcaggtgtggtgactgtgggcctatttgctaaccgtggtgcggatattgtattgatgggaacacttgatggagtggaaaccatcactcaataa

SEQ ID NO: 10201 - DNA, 1242 bp, Photorhabdus luminescens
atggttaaggtatctctggaaaaagataagattaaatttttgctattagaaggtgtacatcagagcacggtagaaaatctacgagcagccggttatagcaatatcgaatatcataagggagcattagatcccaaagagttaaaagaggcaattcgtgatacccattttgttggtatccgttcccgcacacaactgaccgaagacatttttcaggcggccgaaaaattggttgctgtaggctgtttttgcattggtaccaatcaggttgatctgaaagcggctgcaaaacgtggtatccctgtctttaatgcgccattttctaatacccgttctgttgctgaaatggtccttggtgagctgttgttattgctgcgtcgtatccctttggcgaatgcgaaagctcatcgtggcgtgtgggataagcaggctaaaggctgctatgaagttcgtggtaaaaaactgggcattatcggttacggtcatattggcactcagcttggtattctggctgaaaatattggtatggatgtctacttttacgatattgaaaacaaattgccgttaggtaacgctcatcaggtacgtcacttgtcagaattactgaatatgagtgatgtggttagtttgcatgtaccagaaacgccatcaactaaaaatatgattggtgcaactgaactgaccctgatgaaaccgggttctatcctgattaatgcttcacgcggaacggtggtggatatcccggcattatgtgatgcattggaaagtgaacatctgtcaggggcggctgtggatgtgttccctgttgaaccggcaaccaataatgatccatttgagtcaccgttacgtaaatttgataacgtgttgctgaccccacatattggtggttctacccaagaagcgcaggaaaacattggttatgaagtcgcaggaaagttagcgaaatactctgataatggttctaccttatcagcagtaaacttcccagaagtgtctcttcctgttcatgctgatgataccaaccggtttctacatattcatgaaaatcgcccgggtatattgaacagtattaaccaggtgtttgctgaacaggatatcaatattgccgctcagtatctgcgtaccagtggggacatgggttatgtggtgattgatattgtgactgaaaatccggctcaagctgaaatggtatttcagaaactgaaagcattgccgggtactatccgttctcgtctgctttactga

SEQ ID NO: 10202 - DNA, 216 bp, Photorhabdus luminescens
atgatgatcccgctggttgcttttgaccgcacaggacaacggcttggcatgggtggtggcttttacgatcgtacattgaggcaatggcaacaaaaaaatttctacccgataggtctggcgcataactgtcagttagtcgatacactgcccatagccgaatgggatatcccattacccgaaatcatcacacctgaaaaaatctggcaatggcagtaa

SEQ ID NO: 10203 - DNA, 414 bp, Photorhabdus luminescens
ttggagaatctcaaccttaatcgctgctgctatccactggcaagttctatgcaatcagagcacctattatcactcagacaaagcattagaaagaaaatacgccaacaacgccgtgaactcacttctgaacaacaatctctttttgcaagacaggctgctgagcgagcaatcaaccaccccaaaattcaccaagccaacaaaatcgcgctattcctttcgtttgatggtgaactcgatacccgtccactgattaaccaactctggcaacaaaataaacagatctatctgccggtattgcaccctttccgtcatcaccatctgttatttttaaactatcaacccaatagtcggcttgtcagaaatcgcttcaatatagagagcccaccgctgaatgttgagcaggttttaccgtaa

SEQ ID NO: 10204 - DNA, 330 bp, Photorhabdus luminescens
atgtctgcacaaccagtagatatccacatttttgggcggtcactacgtgtcaattgtccatcagagcaaaaagaagcattgctggctgcggctgtggaacttgagcaacgtttagacgatttaaaagagcgcaccagagtaaccaatactgaacaactgatttttattgtagcactgaatatctgtcacgaattggcacaagaaaaagtgaaaacccgtgactatgcctataatatggaacagaaaataaagatgcttcaacagactatagaacaagcattagtggaacaaggtcgcatcactgagagtactatttcatcaaatgaatga

SEQ ID NO: 10205 - DNA, 576 bp, Photorhabdus luminescens
atgtctatacagaattcattaccagattatcaatcttttgacgaaacattgcatcaacagtcagtggcactgacggcagcggagatgcatgggttgattagcggcctgctgtgcggcggtaatcgcgacagtagttggcaggtcttagttcatgacttagcgaatgatgggttagctttttctcatccattagcccaaaaattgcgtgaattacgtgaaatcacattcgaatcattggatgacagtaattttgcattcggtttattgctgccagatgaggaagataatgtatttgaacgagcagatgcattagctggatgggttaaccattttttgctgggattaggggttgctcaaccgaagttcgcggatagaaaagagattagtgagattattggtgatttgcgcaatatcggtctgcttggttatgaagaaggtgatgatcaagaagagttgtcccaagcactggaagaggtccttgaatatgtgcaagtggccgcacagctttgctatatcgcctttactgaacctaaaaccgttttaatcgccaaaaatgataaaccaacattgcattaa

SEQ ID NO: 10206 - DNA, 1317 bp, Photorhabdus luminescens
atgatcaaacaagaatatttatcccgccgtcaggctttactggcaaaaatggctccggccagcgcagcgattattttttcttctccgcctgcgccacgaaattcagataatgaatatccctatcgtcagcatagcgatttcctttatttgactgggtttaatgaaccggaagcggtgctgatattaattaagagtgatgatacgcataatcatagtgtgctttttaatcgagcgagtgacttgactgcggaaatttggtttggtcgtcgtcttgggcaagaagcggcaccggaaaaactgggtattgatcgcgctttgccttttgatgatatcaaagaagagctttacctgttgctgaatggtttgaatgtggtttatcacgcgcaaggtgaatttgcctacgcagatgaaattgtctttcatgcgttggatatattaagaaaaggcggtcgccgtaatctttcagcgcctttatcgataactgattggcgcccttgggtacatgaaatgcggttgttcaaatctaaggcagaaattgaggctatgcgccgggcaggtaaaatcagtgctcaggcccataggcgcgcgatgaaagtttgccgcccaggaatgtttgagtatcaactggaagctgaaattcatcacgaatttacacatcaaggggctcgctatcctgcttacaacacgattgttgggagcggtgaaaatagctgtattctgcactacaccgagaatgaaagcaggatgaaagagggtgacttggtgttggttgacgcaggttgtgaatatctggggtatgccggagatatcacccgtactttccctgtcaatggcaagtttactcgtgctcagcgtgaaatttacgatatcgtactgaaaacgttaaatgtttcgttggaattgtataagccaggtaccagcatcaacaaggtcacagaacatgtggtgcggattatggtggaagagttggtgaaactgggcattatgcacggtgaagttgagcatttaatcgaaaccaaagcctatcgccaattctttatgcatggcctcggtcattggttaggattggatgtgcacgatgtcggtgactatggcgtagagcgcgaccgtattttgcaaccaggaatggtattgacggttgaaccggggctgtatattgcaccagatgccgatgtaccgatggaatatcggggtatcggtatccgtattgaagatgacattttgatcactgaaacaggtaatgaaaacctgacagccagtgtcactaaagaagctgatgagattgaagctctgatggcggaagcaaaacagggttaa

SEQ ID NO: 10207 - DNA, 1179 bp, Photorhabdus luminescens
atgaacgtgattatcgttggtggaggcatgaccggcgcgacgcttgcgctggcgatatcttccctgagtaaggggcagatccatgtgtccctgattgaagcagcagagccggagcagaaacatcccggctttgatgccagagcgatagcgctggcttacggtacttgtcagcgtttacaacagattggtgtttggtctgctctggaagattatgtgataccaataactcacgttcatgttagtgatcgtggtcatgcagggtttgtgaatctttatgcaaaagaatataacattccagcgctaggtaatgttattgaattgtatgatgcagggcagggtttgttcggattgctgaaaaatgcgcctggtgtaacgctatattgtccatccaaggttatggctgttgaaagaactttgtcatcggttgctgtcattttggacagtggcgaacgattgcaaggtgaattgctggtagcagcagatggcagtcattctgccattggtcacgcttgtaatattcagtggcagcggcatgcttatgagcaggttgccgtgattactaatgtactgacttcagagcatccgcgaggtagggcatttgaacgtttcaccgaatatggcccacttgctttgctgccaatgtctgaggggcggagctcgctggtatggtgccatcagttggcgcggagaaaggagatagcgggttggaataatgagcaatttcttaggcagttacagcaagcatttggctggagactggggaaaatattggaaaccggccagcgttatcgctatccattgacactatctactgcaaatcaacaaattagccaccgattggcgctggtgggaaatgctgcacaaacattacatccgattgcgggtcagggctttaatcttggtatgcgagatgttatgacactggctcagattgtttctgaggcttttgctgctggtcaggatattggtgcttaccaggtcctggctaactatcaacagcaacgggttttagatcgggaaaacaccattgatattaccgatggattgatacgggtatttgccaatcgttattttccattacaaatcgggcgtaactttggcctgatgatgatggaaaaatgccctcctatgcgggatatactggcccgtcagactctaggttgggtcgcccaaagataa

SEQ ID NO: 10208 - DNA, 1221 bp, Photorhabdus luminescens
atgcaatcatttgatgtggttatcgctggtggcggtatggttggtttagcgcttgcctgtggcttacaaggcagtggcttgcgagtggctgtggtggagagctatccgccgactcaatccgttgttgctggagaagagtacactttgcgggtttctgcgattaatgcagctagtgagcgcttattgcagcatcttggtgtgtggcaagatattttggatatgcgcaccagtccttatcaggaaattgaggtttgggagcgggatagctttggccgtattcggttcagtgcggctgaatatgggctggaatatcttggtcatatcattgaaaaccgagttatccgtgaaacattatggaaaaaagtagatagcttatctgacgtgaccattttggcacccgcggctttgaaacaggtagcttggggtgaaaatgaaacttttatgactttatccgatggtcgcatgttaactgctcgtttagttgttggtgctgatggtgctcattcatggttgcgtcaacatgctgatatccctctcacattctgggattatgaacatcatgcattggtagccactattcgcaccgaagagccgcacggctgggttgctcgtcaggtcttttatggtgagggtattttggcgtttttgccgcttgccgatccccatttatgttctatcgtctggtcactaccgggtgaagtcgcagaacagtacaaacagcttgatcataggcgtttcaaccagcaattggcggtagactttgatctgcgccttggtcaatgtgaactgatgagtgagcgtctgacgattccactgacgggtcgttatgcccgtaattttgcggctcatcgtctggccttgttgggagatgccgcccatactattcacccattggcaggccaaggtgtgaatttgggctttatggatgtcgctgagctgataggtgaattgcgtcgtttgcatggtcagggaaaagatattggtcagcacttttatttacgtcgttatgagcgccgacgtaaacatggtgctgctgtgatgctggccgggatgcaaggttttcgtcaattatttgatggcaataatccggcgaaaaaacttttgcgggatgtcgggttgtctctggcagataatttaccgggaattaaacctaaattacttcgtcaggcaatgggattgaatgacttgccgaattggctctgttcggctgaaaaaatctaa

SEQ ID NO: 10209 - DNA, 897 bp, Photorhabdus luminescens
atggcaaaacaaaccccattgtatgaccagcatctggcttgtggtgcacgtatggtagattttcatggctggatgatgcctttgcattatggttcacaaatggatgaacatcacattgtccgcactcatgctggtatgtttgatgtttcccacatgacgattgtggatctgcatggtactggttgccgtgatttcctgcgttatttgttggcaaatgacattgctaaactgacagaaaagggtaaagccttatacaccgggatgcttaatgcttctggtggtgtaattgatgacctgattgtttattaccttagcaatgatttttatcggttggtggtcaattctgcgactcgtgagaaagatctggcttggattaatgaacatgtcgccaattacccggttgatattcaggttcgtgatgatctggcattgattgcggttcaggggcctgacgctcaggcaaaagtagagtctctattgaatgatgaacaaaaacagactattgccggaatgaaacctttctttggtgttcaggcgggggatctgtttatcgcaacaacgggttataccggtgaggcgggttatgaagtggcattaccaaaagagcaagcagccgatttctggcaaaaattgctgagtgtcggcgttaagcctgcgggattaggtgcgcgtgatacgctgcgacttgaagccggtatgaacctctatggacaggaaatggatgaaaccatttctccccttgtggctaacatgggttggacaatcgcttggaaacccgaagatcgccagtttatcggccgtgaagcgctagaaaaacagcgtgaagagggcactgaacaagttggttggtttggtgatgagagaaaagggtgtgttacgcggtggtttagcggttag

SEQ ID NO: 10210 - DNA, 285 bp, Photorhabdus luminescens
aaaaacagcgtgaagagggcactgaacaagttggttggtttggtgatgagagaaaagggtgtgttacgcggtggtttagcggttagttttactgatgagatgggcaccttacattctggcgttattaccagtggtacgttctctccaacattaggattcagtattgcccttgcccgtgtgccgcaaggaattggtgaacaggcggttgtccaaatccgcaatcgtgaaatgccggttcaggtagtcaaacccagctttgtacgggcgggcaaacctctcgtatag

SEQ ID NO: 10211 - DNA, 393 bp, Photorhabdus luminescens
atgagtaatgtacccgcagagttaaaatatgttgaatcacatgagtgggttcgtgcagaaggtaatgatgaatacacggtaggtattaccgagcatgcacaggagctgctcggtgatatggtttttgttgatttgccggaagtaggtgatcaaatcaatcttggtgatgattgtgcggttgttgaatcagtaaaagcggcttctgatatctatgcaccactgagtggtaaaattattgccgttaatgacgcgctaaatgacgcgcctgaactggttaacagtgagccttatcatgaaggctggctgttccgtattaaagcctctgataaaagtgaactttcgagtttgctgaatgccgaaggatatcaggcacttctggacgaagaagaataa

SEQ ID NO: 10212 - DNA, 2877 bp, Photorhabdus luminescens
atgacccagacattaagccaactcgaaaatcagggcgagtttatccgccgtcatattggctcttccgccgaacagcaaaaagagatgttggcgacagtgggggcaagttcccttaatgatttaacacagaaaattgttcctcgtgatatcgcgttgccagagccgcccgatgttggtggcggtgcaactgaacagcaagcactagctgaattgaaagcgattgccagccaaaataaacgttaccaatcctatattggcatggggtatgcgcctgcggtgcttccgccagttattttgcgtaatttattagaaaatcctggctggtataccgcttatacaccttatcaacccgaagtttctcaaggtcgccttgaatcactgttaaatttccaacaagtgacgatcgatttgacggggttggatattgcttctgcttctttgctggatgaagccaccgcggcggctgaagcaatggcaatggcaaaacgtatcagcaaactgaaaaatgctgaccgtttctttgttgctgatgatatccatcctcaaacattagatgttgttcgtacccgcgcggaaacctttggctttgatgtgattgtggataaagcagaaaaagtcttggagctggacggtgtatttggtgtgttgttacaacaggttggcacgacaggtgaagttcatgattatgcggatctgatcgcacaactgaaacagcgcaaaatcattgtcagtgttgccgctgatttgatggcgttgctgctgctgactgcaccgggtaaacaaggcgctgacatggtgtttggttcagctcagcgttttggggtaccaatgggatatggcggtccccacgccgcattttttgccagccgtgatgaattcaaacgttctatgccgggacgtattatcggtgtttcccgagatgcggcaggtaatacggcactgcgcatggcaatgcagacccgtgagcagcatatccgtcgtgagaaagcgaattccaacatctgtacggctcaggtgttgctggcaaatatcgcggcgatgtatgcggtatatcatggttcgaaggggctgaaacgcattgcaggtcgtattcatcgtctgactgacattctggcggttgggttacagaaagctgggtttactctacgttacaaaacttggtttgatacgctgacggttgaagttgctgataaagcggcggtattagcccgggcagagaaagctgaaatcaatttgcgtaccgatacttacggcgcggtggggatcacattgagtgaagctacccgccgtgatgatgtgatcaaattgttctctgtgctgacaggcacggatgacaagctagatgttgaagcactggataaagagctgatgacggaaagtcactccattcctgcctcaatgttgcgtagtgatgaaatcctgctgcatccaaatttcaaccgttatcacagcgaaacggatatgatgcgttatatgcatcgtcttgagcgccgagatttggcactgaatcaggccatgatcccattgggttcttgcaccatgaaacttaatgccgcggcagaaatgttgccgatctcttggcctgaatttaatgaactacacccattttgtccgccagagcaagcgcagggttatcagcaaatgatcagccaattatctcactggctggtgcaactgacaggttacgatgtcgtttgtatgcaaccaaactccggtgcacagggtgaatatgcgggtctgcttgctattcgccgttaccatgaaagtcgtggagaagggcatcgtcatatctgtttgatccccagttctgctcatggtaccaacccggcatctgctcatatggcaggcatgaccgttgtggtggtgagttgcgataaagagggcaacattgatctagttgacctgcgtgaaaaagcggaagaatcaggtaatgagctttcctgcatcatggtgacttacccatcgacccacggcgtatatgaagaaactattcgtcaggtgtgtgaaatcattcaccagtatggtggtcaggtttaccttgatggtgcgaatatgaatgcgcaggttggtatcaccgcgcccggttttatcggagctgatgtttcgcacctcaacctgcataaaacattctgtatcccacacggcggtggtggcccaggtatggggccgattggcgtaaaagcccatttggccccgttcttaccgggacactcggtagttcaaatggatggccttactgaacagagagctgtctcagcggcaccatttggtagtgcttctattttgccgattagctggatgtatatccgtatgatgggctcgcaagggttgaagcaggcaagccagacggcgattttgaatgctaactatattgctgctcgcttaaagaatgattatgacgtgttgtatacgggtcataacggttatgtggcacatgaatgtattctggatattcgaccgttgaaagaagagtttggtatcagtgagatggatattgccaagcgcttgattgactatggcttccatgcgccaaccatgtcattcccggttgccggcacgctgatggtggaacccacggaatcagaaagcaaagtggaaattgatcgctttgtggatgccatgctggcgatccgtgctgaaattggcaaagtggcaaaaggtgagtggtcattagaagataacccattggttaacgcgcctcacgtacaagctgaactggtttctgactggagccatagttacagccgtgaaactgcggttttcccaaccttggaaaccaaagccaataaatattggcctgcggttaaacgccttgatgatgtttacggtgatcgtaatctgcattgctcttgtgcacctgtcagtgattatcaataa

SEQ ID NO: 10213 - DNA, 6408 bp, Photorhabdus luminescens
atggataaacgccacaactcgatggctagggtcacaagttatcttttaatttacctgacggcaatccagccattgcacccggctatggctatcggcataacaccggataacaaccgcacacaggtacaaaatcagggcaatgtaccggtggtgaatatcgccacgccgaatgatgcagggatatcccacaacacctatcaagagttcaatgttgccactcagggggccgtacttaataacgcgacacaggcggctcaatcacaactggcagggcaacttaacgcgaaccctaacctgaaaggcaaagcagcggaactgattattaacgaagtcaccggcagtggccgctctgacctgcaaggccagttggaaattgttggcaataaagccaacgtgatgattgccaaccctaacggcattacctgcgatggttgtggttttattaataccgccagcgcaaccctgaccaccggtaaaccccaatttgataaacagggtgcgttggaagcactggaagtgaaaaaaggccagattaccattggcggcaaagggctggacggcaagacgacggattatgtcgatatcatcagccgggcggcggagttgaatggaaaaattcaggctaacactctgtcgctgactcagggggccaaccgtgtcagcttgaaagacggcacggttaaacctatcgccggagaaggggcaaaaccgcaattagcggttgatactaaagccttaggcggcatgtatgccaataaaatccgactggttgccactgaagacggggttggggttaatctcaccaacctgaccacaacccaagacgctatcagtttaaccgctgagggtaaaattatcttgggggaggtacaagctaagaccgatatcaacatcaacagtaaagccattgaaacggcggcacaaagccatgtgcaggcgggtcaacatctgaaattgaccaccgaaacactgaggaatcaaggccaaatccgggcggatggtgatgtcacgattaaagcgactcaacttgataacgtaaacccgactaagcaaagccacccgattattaccgcgggtaaaaacaacagcattaccgcgaacgagataaataatgttggtgagttaagcgcgggacaaaatctcaccctgacaggcaaaaatttttcaaccaaagcgataaaagacaatcagcagaatatcattggtaaactgagtgccggtggggatttgacggctgtctttaaagagggatttagttttgattttaataaagaacattttaaagcgggaaagaaacctacggatctggcgttaatcaccgggaaaaacatttctctcactgcccgagatttagcaaatcgtgcgtcaatgagggcagaacaaaacttagccgttgacgcagaaacaatctatttaggccaggggaatttaaaagccgggaaccatgtcatgctggatggaaaatcacatcttgatgtgaatggttatgatatctccggtcgggatgtgaccttgcttgccagccgggggctgctgtctgttgtctctggagatgactatacccctgagggaataagggtattaaccacgctttctgctgataacatattacgcattatcgccgagggtcctattaatatcgccgatactctgattaaccgggcgaaaaatatctttttggcaaccaatgataagcttgagatttatgcctctggtgatttaattgatgagcagagttcactcaatgacggcgctaaacaagcattcattaatcagcgtctgcgccagctcagccaattgcaagcggatgaaaatattgagatccatgcaggaaagattgtcgatctgagaagcatttccttgacggcggggaaagatatcacgctgaccagtggcggcacgcttgatgtgagtaaaatcacagcagaggacccctatgaatatgaagatgaacacggaacgggttatgaaaagcattatgaatatgaaaatgctgatgacgaggaagacgaacaatcttacccacaatttcaattacccatagcgagcagtatcatcactgccggcaataatttaacccttaatgctggtggtgacattattgatactgaggcaactttgtcggcaaaaggggtgactgccattgtcaaaaacaacgcagagttacattcaccgtcagggaggtataactcagttgaagggaaatatacgccagtcacttctgcgctgattgcatgtgcgttaagccatgctcctcaactgaccataaacgcctcagaagtagaaggagaagtcccagggattaaactggcggataagcaaactcggatcacctcgaaaaacaatcaccctattattcatattgcggcacctaacgcccgtggtgtttcacataaccgttatcaggagtttaatgttggggcttccgggctggtgctcaataatgctaccgaagctacccaatccgtactggcgggacaaattggggcgaaccctcacttcaacggtcaatcggctgaactgattattaatgaagtggtgggtaccttagcctcaaatctgcaagggctgttggaagttgcagggcagaaagctaatgtcttcattgttaacccgaacggtatgacctgtaatggttgtcgctttgttaatactccggctgtcaccttatcgaccggtaaaccggtatttgataaagatggcgcattagcggccttggaagtgaaaaaaggcgctatcaccttgggtgaaaagggactggatgcaacagcgcaagattcgatcgctatcatcagccggaccactaagcttaacggtaaactccaggcgaaaagcctgacattgacacaaggccccaaccagattgatttcaaacgcggaacccttgttcccatgacaggggaagattatggcccttgggaagcgattgataccgggttattagggggaatgtatgccaataaaatccgtctggtgagtaccgagccgggtaaggttgtcaatctgaccaacctgacggcaacccaaggcgacatcagtctgacggcggatggcaaggtgactctgggggatgtacaggccaaaacggatatcaccgttaacggtaaagacattgacatggtgaaaaaaagtcatatgcaagccggtcaacatctgatattgacaaccgatacattgcagagttggggacgaattcgtgccgacggtgatgtcactattaaagcgaaaaccttgtctttagatgggggaaatatcaccgccgggaaccaggttctgctacagggaaagaacagttttacggtgcgtggcacggatatttcaggtcatgacattaccttgattgccaatagttataatacttctgtttcacctagtgacacgtcggaaagcacacaagtattacctattatttctgcggttaatacgctgcgtattctgtctgaacagggaatatcgctttcagatacgctaattaaccgggcgaaaaatatctttatggcgagtaatgggtggattggtattaatcagcatttggcggcggatgagaatattgatcttcacgctggaggggggataaagttggatgggatttccctgaccgccgggaaagatattaccctgaccagtggtggctcgattaatattggcaaggtcaccgctggcaacaatttagcgctgattgccgacagcaatataacagagacagcattatcggcagaagggacggccgcagtcgcccaatatagtaccgcgttgcacttagccgacgggagatatactccggtgacttcggcgttgattgacctcgcattagataatgccccccaactgaccatcaatatcccagaaatagctggtggaatacccgggattcaactggcggataagcgagcgcggattgctgtgagaaataacctgcctattatccatattgcggcaccgaattcccggggtgtttcacataaccgttatcgggagtttaatgttggggcttccgggctggtgctcaataatgctaccgaagctacccaatccgtactggcgggacaaattggggcgaaccctcacttcaacggtcaatcggctgagttgattattaatgaagtggtggggactttagcctcaaatctacagggtctgttggaagtggtggggcaaaaagccccggtcttcatcgctaacccgaacggcataacctgtcatggttgtggttttatcaataccccggctgtcaccttatcgaccgggaaaccggtatttgataaagagggcgcgttagcggctttagagatgaaaaaaggtgtcataacctttgatgaaaaggggctggacgcaacggcgcaggatgctgtcgacattatcagccgtgcgacgatacttaacggcaaagtgcaggcgaaaaacctgacattgacacaaggggccaaccggattgatttcaaacgcgggactcttatccctattgcaggcgagggtgatacctcttggaaagcgattgataccgggtcattggggggaatgtatgccaataaaatccgtctggtgagtactgaggcgggtaagggagttaacctgaccaacctgacggcaacgcaaggcgacattagtctgacggcggatggtaaggtgactctgggcaatatacaggccaaaacggatatcaccgttagcagtaaaagcattaaaacggcggaacagagtcatgtgcaggcagggaaagagatcacgcttgccgcgaacacgctgaacaacaccggtaagattatcgcagaaggtgacatgcggttatttatcgaccatttatacaatcagtataaggggctgattcaggcaaataatcatctctggctgcaaaaagacgcgagcggtaatttaagcactgaaattaacaacacttcagcgacactgaaaacccataacggcgatattattattcgcgcaaaagcgttaaataatgcctgggatgccagcgtcgcggcgggaatgaacgcttatatccatgcaacgaagctggataatgatgaaagtcagtttcatgcgaagaaaaatctcatcttaaccggtcacgattttaaccgcgggatggacggtaaactctccgccgatctgaatgtggtggctgattttattcatcaactccgcggaacggcattcatctcggcgaaaaatattctgctgcatgccggtgaaattattaacatagggcacctcaacgcgggcaatgatctgtccgtcatcgccgagcgtcgaatgtatgccggccagagtacactggaggcaaaaagaaatctgaccttgattgcaggtaaagatattgaggcttttcaagtcgggttgaagggagaaaatattgaactgcttacgcgtgaaggcgacatccagatgtggggggacggttcgcgtatttcggccgacaacaatttgcggatattcgcggatcacaaactggatctctatggtcttttgttcgataaatcaaacacgataacgttaaacgcgggtcatgaaattgataccagccgggttaaattggccgtgcagaaaaatctgacactgattgcgggcaaaggtatcactgcccgtgaaaccgggctgaaaggggaaaatattgagcttctcgcgcgtgaaggcaacattcaaatgggcgggcatgattcgcgtatttcggccagcaataatgtgcagatgttcgcgagcaacaaactggatctccagggtcttttgttcgataaagccaacaatataacgttaaatgcgggtcatgaaattaatgccgaccgggttaaattagcggcaaataaaaatctgaccttaattgcgggcaaggatatcaccgctcgtcaggcagagttaaaaggggaaaatgttgagcttctggtgcgtgaaggcgacatccaaatgggacggaatcggcctcatgagttattagcctcaatttcggccgataatcatttgcggatttccgcgggcaacgatctggacctttccggtactcagttagataaatcacacaatctgacattaagtgcgggtcgtaacctgaatgccagtcgaagccaattgaaggcggcgggcaatattaatctgtttgcgggaaatgatttaatgttgcggcaagcgggtatccgggcgggacaacaagtcatgctcagtgcgggtcgcgatattgatatctctcggcccaatacgccagagagcctgttttatttatccgaattagatggattagacaaattctctgaattaggtacgcaaattaccgcgggtgatcacctgcaactcagtgcagggggcgatattgcgggtatcgcgagattaatatcgactaaaggaaatgtctcggttaacgctggtcgggatttactgttctctgcccggaaatattcgccgattaatgatggcgattga

SEQ ID NO: 10214 - DNA, 894 bp, Photorhabdus luminescens
atgatggcgattgagaataactatctgagcgtgaatgagctggacagttttgcgcatcaagcccgcacctgtgaaggcgaaagctgcaaacaagtgatcaaggatatggtagacactaatatccgcaatcagcaggaaatgatggatttctgtaacagcaacccgacccagtgcgcacagaagtatggttatctggttgatcagtggccggtgtttgagcggaccctcaaaaatatggaccgggatggcacattgccagttgagttcagaaattacctgtcggcggtgaatacgttaggtcaggcggcaaccggcaaggtaggcgaactcggctggacaaaacgctttgaagcaatgggcatgagtcaggagactgccgctgcgatggcgatgacgttgcctgttattgttgagggcagcaaagggccgaaatcatcgccaacaacaaaaggaagcacaggcgcggttgttaatacagagaaagcggcgctggaaaagattgggaaaaacagtcaaggcacaacgaatctgggtgataaatcggctaatactatttatcatcaacagcttatcaaaaatgctgaaaagatatctaccgcgaaaccggggcaacaagttgcagcgccaagggatctgaatgagcagattttatggaaccaagttaaagctaacccatcttcaggtgatccacttagaggaatgaataaagatcctcgtttccctactgatgcaggattccagaaaatgcaagttacacatgagttaccagacggttcaaatatcaccatccattatcaatataactcaactactggtaaggcttatgatatgaagattacaactcctaaacggcctgaaatccaacctaagccttcaatcacggataaaaaatga

SEQ ID NO: 10215 - DNA, 309 bp, Photorhabdus luminescens
atgaaaataaaaaagttcaaatcagaaaaaattattgaagtttttgccatatattggttcggagaaaaaacatacttttacggttttgctaaaggttatgacgggctgcttagttataacgcagaggaagtagaaattatagagtcatcgttatctggtgattttgttttctttgaaaatggcatattttacaagccactcattgaaaaaaatatattagatgacctgttagaagcagatccagttgcttatcaatgttttttagaaacattgaaatcggaaggcagaatagaacaagatttttgctaa

SEQ ID NO: 10216 - DNA, 141 bp, Photorhabdus luminescens
atgacccgctattacagccagcaccccagtttgcatcttaaaggcaactggctggaagaagcgggctttgccaccggtcagccggtgcaggtcagtgttgagcacggacagttgattatccggctcgtcgagaacggctaa

SEQ ID NO: 10217 - DNA, 387 bp, Photorhabdus luminescens
atgcacatctcattaccacactggatttgtgaggaagatatgcaactgtttgctacacggctaaaggaagccagagaagcccgcaagatgacacaagcaagattagctgaactgctcaacgttgatcgccgggtttataaccgttgggaacgcggcgcttccgttcctcaactggatgccgtggtcaggatcgctcaggtattacaaagtagtctggattcacttgtcggactggaacccatgacaccgccacagatacataatccgcgtttacaggcgcttgtgatgcagatggattcattatcagatgaagatcagcaggcgctgattgtgttgatggacagtttgcttaaacgttcgaagatgacgcagttactgacatcgtag

SEQ ID NO: 10218 - DNA, 3315 bp, Photorhabdus luminescens
atggcccgcattcccgataccgatttagcccacttaaagcaaaccgtctcgttgctggggctggcgcgtaagcaaggccgtacgatgaaaaaacgcggtgaggattatgtgctgcgctgtccgttccataacgagaaaaccccctcaatggtgatatcgccggctaagaacctgtatcactgctttggctgtggcgcagcggggtcggtgctcgactgggtgatacaaacggaaggcgtgacgttgaaaatcggtatccgccggctgcgggagctggccgggctgccggacatggacaatgcggttgtggccgcttcttcgttagccgcccagccggaattacaggcggcccccctgccgcgtccgaaactggccgacctggacgatgacgggcaggcgctgctgcatcaggtgattgatttttatcatcagcacttactggcgtcaccggaagccaaagcctggctggaacgacgcgggctgaatcatcctgaactggtcagtcactttaagctggggtacgcgggccatcacgggatcggcggttcagcgggcttattaccgtccaagagcagtcaggaaggccagcaactgcgcgacaaactatcaggtctgggcgtgttgcgtaccactacccggcaggaccacttccggggctgcgtcgtggtgccggtgatcggctggacagaatcggtcaatgtgaccagccgcgggcgggtgttgcaactgtatggtcgccggacccagccggattacaaagtgctgaaagacagcccgaagcatctgtatctgccgtcaccgctagccggggtctggaatgaatcggcgatgcaggcatcaaatgaaattatcctgtgcgaagcgctgatcgatgccatgacgttctggtgtgccgggttccgtaacgtgattgccgcgttcggggtgaacgggtttaaccgtgagcacctcgaagccttacagtatcacggcgtgaaacgggtgctgattgcctttgaccgggacgaggccggagaccgtggcgcgaccagtgtggccgctgatttactggaagccggtatcgaggcatggcgggtgcagttcccgccgggcatggatgccaatgactatgcgctgaaaagcggcaacgccgaacatgcgctggggctggcgttgcaacaggcggtctggctgggacagggaacagcgccgggcgcggtgttcagccatgagcggcccgtctcgccgacagtgacggaaaagccccaaagtgccggggtggctaaaccggctgctttagccgccccgtcggcgctgactgttgcccccgtgccctgtgagcgcacggcctgcggtgaactgttgatgaaaagcggcccccgggtctggcgggtacgggggatgaaaaaatccccggtgccggatgtgatgaaggtgaacgtgcaggtgcgggatgaaacgtccggcctgttccatgtggatacgctggacatgtaccatgcgcggcatcgtcagaactacatcagcacggcggcgcaagagctggaatgcgagccgtctgtgattaaacgtgaagccgggcgggtcttgctgatgctggagcagcaacaggacgcgcaacagcaggccgacgccgaagcctcagggacaacggcagtcacggtcagcgcggaagacgaagccgccgcgctggcgttgctgacatcgccaaacttaacagaacagattatcaacgacatggccgcctgtggcgtggtcggcgaatccaccaatctgctgaccgggtatctggcggcagtctcgcgcaaactcgataaaccgctggccgtgttaatccagagcagcagcgcggcaggcaagagcagcctgatggatgccgtgctgaacctgatgccggaagaggagcgtatccagtactcggcgatgaccggacagagcctgtattacctcggcgaaaccagcctgcaacacaaaatactggcgatagccgaagaggaaggcgtgcggcaggcggcctatgccctgaaactgttacagtccgacggcgagctaaaaatcgccagtaccggcaaaaacgaacagagcggcgaactggtgacgcgggaatacaaggtgcagggaccggtgatgctgatgttaacgacgacggccattgatgtggatgaagagctgctgaaccgctgtctggtgctgacggtcaacgaatcgcgcgagcagacgcaggccatccacgccatgcagcggcaccgccagacgctggccgggttgctggctgactcggagaaaggttatctgacacagttacaccagaacgcccagcgcttgttaaggccgctgaaagtggtcaatccttacgcccaccaactgacgttcctgtcagacaaaacccggatgcggcgcgaccacatgaaatacctgacgctgatacaggccattgccctgctgcaccagtatcaacgtgaagtgaagaaaacgacccaccgcgggcaggtcatcgaatatatcgaagtcacccaagacgatattgccctcgccaaccggctggcgcatgaggtgctggggcgcacgctggatgaaatgccgccgcagacgcgcaagctgttactgctgatacaagagatggtgaacgaacaggcgcaaatccagcactgccagccaaatgaagtccgctttacccggcgagatatccgtgcctttacccactggagcgacagccagctcaaaaaccactgtcaacggctgacggaaatggaatacctgctgttgcatggcggcagccgggggcacctgctgcattatgaactgctgtgggacggggaagacaacggcgcagcccacctgtgcggcctgctggatgtcggagaaccggactccgaaaccgccggcagtgaacgcaagtctgacccgaaaggtcgcaagtcttccccaagtccggggcaagtctggcctgagtctggggaagaaaaacccgcgtcatccccgatagcacaagggccggcgggggcacaagtccgggcagatgaaaacgcggttattagggaaaataatcacagagacgcattgcccgtgcccgacagggataaaacaccggaagccgtcccgacaggtcaggagagcaagtctgacttaaataaacgcaagtctgcctcaagtctgggtcaggtccgggctaagtctggggtgaaaaaatccccatccgagcaggcagagcacgggttcagcgtaccgcaagtcggggtaacggaagacaccgtgataaaaggaaaaaagaaaacgcgccccttgtctgcgcccacccctcaatctcaaccggaggtcaatcatggcaaaccgtaa

SEQ ID NO: 10219 - DNA, 1131 bp, Photorhabdus luminescens
atggcaaaccgtaaaccccgcagaggaagcctgctgacagtagatgaagtgtaccgcaaacctgtcggtccggcgcacgacccgaagagcctgtatgcgttgttgctgcgctttgtggtgtggcgacaggaacggaattggtcagaaagcacgctgaaagtacagacgcaccatacttaccactttatcctgtgggcaaccgagcgcggcttatactacgcagcggatatcacgcggccgatactggagcgttaccagcgttatctgtaccagtaccgcaagaccaacggtgaaccgttaagcacccggacgcaacgtacccaactggaacccttgaaggtctggttcaaatggctgacgaaacagaatctgatactggcgaacccggcggcggacattgaactccccagactggaaaagcacctgccgcgctatatcctgaccatcgatgaaaccgaacagatactggcgcagcctgacctgacgacgttgcagggggtacgtgaccgggcgttgatggagttgctctggtcaaccgggatgcgtcggggcgaattaacccggctggatgtgtacagcgttgacggaaaacgcaaaacggtgaccatccggcagggcaaggggaataaagaccgggtgttgcccctcggtgaacgggccttaagctggctacagcgctatcagcaacaggtgcggccacaacttatcgtcaatccagacgtcaaggcattattcgtcgcaatggatgggctggacggcttacaggctaacggtatcagcaatttggtgacagcttatatcaacgcggtgggtatcgagaaaaaaggtgcctgccacctgttccggcatgcgatggcgacgcagatgctggagaacggggcggacctgcgctggatacaggccatgttaggccatgccagcgtggaatccacccaggtgtatacgcaggtctctatccgggccttgcaggcggtgcacgccagcacccatccggcggagcaaatggccgatgaaaaagtcagcgacgccgatgaggtgggtttactggccgacctgtacgccgacgataacgccgacacggacacgccgccggacagttcagagccgacctcaacccccgatagccgctga

SEQ ID NO: 10220 - DNA, 132 bp, Photorhabdus luminescens
gtgagcccgggcaaccgcctgagcattgatgagcggcttaatgcgtataattggcattatgtcttgcgcccccgcgggtcggcattgcggggagtggcgcacaaggctgcgccttatgctctaaccgactga

SEQ ID NO: 10221 - DNA, 84 bp, Photorhabdus luminescens
ttggggcggggggaagtcaatgagcggaggccgcaggccgacctgcctttaggggggttggcccaacggttgcagggcagctaa

SEQ ID NO: 10222 - DNA, 1383 bp, Photorhabdus luminescens; identical to SEQ ID NO: 7510

SEQ ID NO: 10223 - DNA, 396 bp, Photorhabdus luminescens
atgccctcagccagttaccacccgttttttccaatgggcgttcaccgccggccccaaaaccccctgacgcgcttttcgcctccaaaggccggtttttcccgccgtgccattgtcagtgtagcgcctttttcggcaacgggcgaacgtcgcccaactcgcttgggcggcggatgcccgttctgcgggcgcgggcggcatagagcccgcaagcggcgcccctgcgacgctcgggggcaccggggtttcgggttgcgcatgaccttgcatgaccacgcgattttgttcagggaagcccccgggggctgcacctgtctttcctacacaaatattttaacccgcccccgcgttattgaacttttccctcatagattgatctcaataaaaaacacgacttga

SEQ ID NO: 10224 - DNA, 2787 bp, Photorhabdus luminescens
ttggaggcgaaaagcgcgtcagggggttttggggccggcggtgaacgcccattggaaaaaacgggtggtaactggctgagggcattgggaaaatcggtgtttggcggtcaacttcgcaatggaatgggttgttataaacaatacctttatgccaccagcgccatcaatgctgccaagaatctcacactagttgcagcaggcaacctgctgacctccggggccagcttgacatccggcagtgatatgctgctgtccgcgggtggcaatgttcgctttgaatcgcgacaagaatttatccgcgaggggaatattgagcgctttacgcaacacgccagtcggctgaatagtggtggcgcattaactattcgctctcagggcagtattttattccaggcgacggcgttaatcgccaaaggggtgatggatattgcggcaacaggtggctttctctatgcgcaagcgatggaagaagtctacaggcgggaagaaacagagaaaagctgtaaaggtttggggcccataaagtcgtgtaaagtgtttgggtctaaaaccgaacatagaatacaaatcaagaagaccaacaaagtcacggaatttacggccgggggtgatattaacctgatggcaaaagatgaggtgacattggaagcgagtcggatagaaaccggtaaaaacgcgaaaatcaccagccagacagggaaagtgaacttcaaggcgatgcccaatattgattttgagcagagcatcacgacatcaaaaggcttttttattacacagcgcgataaaggtcaccgtgaggagacttggataatcccctcagtgcatgttggcggtacgctgacggtggaggcggcgacaggcatcaatgcggatgtgaaagtgaaagaggggcagttactggaagacgcgttaggggtactgagtcacactcccggtacggaatggctgaaaaatcttcaaggccgcaatgatgtccagtggaatcaggttaaggacgcttacagtagctgggacaaaaaaagcgaaagcttaaaccctgtagtgggtgcggtgattgcgattgcggtcgcggcggtcacggcgggttcgggcctggcggcctgggcgggaagtggtgccgtgggggcgacaggcgctacgggagccacggcgagcgcggtttatggggcggcttatggcggaatgatcgggttgacctcgcaggcggcggtggccttagttgaaaataaaggggatctcaccaagacactggctgccttagcgaagcgcgaagccgtcaaatccctcgtgacccaaatcgccgtgggtggcgcattagggggcttagaccacacgatgggctggggaaaattagtggagggaaaaggcgttgtcgatccgctaaaagcgcagcttcccttattgagtaatcagaattggagtcaggtggcccagcgtgttgcggcacaatccatcgtgagttcaacaatagggacggcgattaacggcggcagttttacggataacctgcaaaccgcgttgttgagcaatataggtaaccagattaatgcggaaggtgccaaactgattggtgataatggggagattttaggccattcaggcaagatattgagccatacggttgtggcaggcattagcgctgaaattgccggcggggatgccaaaggggcggctgtgggtgcgctggcggctgaattagcggcaatcacaatggaaagccggctatttgaaccggcgtataagaatgaaactgagcgacaaatccataagctacaggaagcgctgacgggtaatgaagttaaggctcagacggctaaatttatcggggcattatcaggtgccctgattagccataccccggaaggcgcttacagtgcggcgaacagcgcggagcttgtctatcgtaataacatgactgagcacatgttgtatcagttatcggtagaaaatcaaaaagacatcttagcggcaggaaaaggggataaagctgcggaagcgcgcgtcattgcgcggcaggatgcggcgattgccgttaccgcggtggcggcaggcggttatgcgctggtttatggcggccagatactgattgccgcctcggctgaaatggcaacggcagggcgtgttgcgcttgagggctgtaaaaccaatccggcgctgtgcctgaataacgtaggtatttttgtcgctgatgcgattgcgccagaagcggcggttgggacgggcgttttggctgcgggaacggtaaaagtattaggtagcaccaaagaaggtgccaaggatttggcagaaggattgagtcatgcgggtatgcaggtcgctgaggcattaacaccgggtggtgtgggtgctgcgggtataatcggtgcgggtaaaactgcggcggaagcggtacaaacagaagctgtagcggttattgcagctaaaaatctgcttaataagtctgttgctcaaaaaatagatgcagggaaatttggcaaattagggttagccgaacttgctgaaacaggaactaaaattgatccggcagctaaagctggaaatttcactgttgctggtagagctttgcagaagcatggaagccgtgagggcagcgcattccctgctgctaaaggaaatccagaacaggttaatcagcaaggacaaaaaatcttggaggagataattaaaacaccaagagctaaggttcaacaaggtaatcgttttggtggttttgatatagtagcaccggatggtcgtggggcgagatttgatcctcaaggtaactttcgtggatttttggagccataa

SEQ ID NO: 10225 - DNA, 204 bp, Photorhabdus luminescens
ctgaaaattgtcatagcaagcgatatagattacgaatgtttggtagctgaaatttattgtaatggagagttttttgctcttttgcaacaagaagagggggttgaaaatattaaggtagaattttctcctagcaccagaataattgatcttgattggcttcaatatgctttatcaaaagccaaagaacatttattgaacaattga

SEQ ID NO: 10226 - DNA, 579 bp, Photorhabdus luminescens
ctggtttatggcggtcagatactgattgccgcctcggctgaaatggcaacggcagggcgtgttgcgcttgaaggctgtaaaaccaatccggcgctgtgcctgaataacgtgggtatttttgtcgctgatgcggttgcgccagaagcggcagttgggaccggtgttttggctgcgggaacggtaaaagtattaggtagcaccaaagaaggtgctaagaatctggcaggagaattgcacaatgcgggtatgaatacattgaagaatgtatctacaggtttgccaagccctcaggggttatcaaaagaaattcatctagggcaacaaggaaaacacattacagggcataacaactatattcctggacgttctccattagcggaaggtgtagatcctcaaaaattacttaatggtgttcactcaggtgaatatcccatcatacggatgactccacgtaatcaacctattgttaattttggtaaaccaatagggaaatatgaaggacagccaacaaattatggcattattcattatggaaaaaacggggcgcatattgttccagctaaccctattcagcattga

SEQ ID NO: 10227 - DNA, 318 bp, Photorhabdus luminescens
atgatgttaaaaactataccagacgagttgtttatatgggtgtcaaaagctcttcttggagaaatttatccggctatcagagcaatagccgttggattcaataatgaaaaaaagctcctaacattaagatattatcttgatcgtgaaccgacagaggaagattacgaaagtttagatatagtcatagcgaatattttagctcacacatcatctaataacgatattagaggtgtaaacgatgaggtagttttctctacaaatccatttagagatcttgatagcttaagtggttttatatacataagaagagaatattag

SEQ ID NO: 10228 - DNA, 1233 bp, Photorhabdus luminescens
ttgagcaatatcggtaatcagattaatgcggaaggtgccaaactgattggtgataacggggagattttaggccactcaggcaagatattgagccacgcggttgtggcaggcattagcgctgaaatcgccggtggggatgccaaaggggcggctgtgggtgcgctggcggctgaattagcggcaatcacaatggaaagccggctatttgaaccggcgtataaaaatgaaaccgagcgacaaatccataagctacaggaagcgctgacgggtaatgaagttaaggctcagacggctaaatttatcggggcattatcaggcgcactgattagccataccccggaaggcgcttacagcgcggagcttgtctatcgaaataacatgactgagcacatgttgtatcagttatcggtagaaaatcaaaaagacatcttagcggcaggaaaaggggataaagctgcggaagcgcgcgtcattgcacggcaggatgcggcgattgccgtcaccgcggtggcggcaggcggttacgcgctggtttatggcggtcagatactgattgccgcctcggctgaaatggcaacggcagggcgtgttgcgcttgaaggctgtaaaaccaatccggcgctgtgcctgaataacgtaggtatttttgtcgctgatgcggttgcgccagaagcggcggttggaacgggtgttttggcggcgggaacggtaaaagtattaggtagcaccaaagaaggtgctaagaatctggcagaaggattgagtcatacctcaaacccgctgttaagcaatgctaaatctgatacccatgccgtagctagtttgatcgaaaatgagaagttgtatatagagcgcaactcgtcaacagcgacggaagctgttgctgtaggtatggcaaagaatggcacacaaggggcaactaatcagcttgttgatggcaaatggcttgatgcaaatggattacccctaccagtacctccaagcgtcggagctgctggtagagtaccaactgtattacaaacaggtggtaatactttaaataagagcacagctaatacactaaataatcaacttggtgagaatctgacaagtcgtgaatggggtcgggctcttgaggctttgaaaaaagaaaatggattgaggaatgatttccacggtcgaattttagataatgggaactatatagatgatgccgggaaggttattgggaatattggagattatttaccatga

SEQ ID NO: 10229 - DNA, 390 bp, Photorhabdus luminescens
ttgatttatccaggaatgatgcaccctgataatgtgagcaggctactgaaacttgaacctacacagaagaatattgttggaacaacagtaactaatagtcgaggaaaaacccgagaaattaagttgtccagttggtttttatcttcaaaatcatatgtagagtcgaaggatctaagggatcatatagattggctgttaaggaaattaaatcaatctgaaataggattaaagcaactgcaacgtactgagggtattagtataacattgagttgtgtgtggcgttctaaatttgggcatagtgggccggtactatggccggaacaaatgagatctatatctgacttagatctagaatgttcctttgatatatattttgatcctgataagtaa

SEQ ID NO: 10230 - DNA, 279 bp, Photorhabdus luminescens
ctgacgggtaatgaagctaaggctcagacggctaaatttatcggggcattgtcaggtgccctgattagccataccccggaagacgcttacagtgcggcgaacagcgcggagcttgtctatcgtaataacatgactgagcacatgttgtaccagttatcggtagagaatcaaaaagacatcttagcggcaggaaaaggggataaagctgcggaagcgcgcgtcattgcgcggcaggatgcggcgattgccgtcaccgcagtagcggcaggtgaacggtaa

SEQ ID NO: 10231 - DNA, 150 bp, Photorhabdus luminescens
ctggcagaaggattgagtcatacctcaaacccgctgttaagcaatgctaaatctgatacccatgccgtaacttgtttgatggaaaaagaagattcgattgctgagatcggtgcggggctgaagctcgcgcttagtcgttgtaccagttaa

SEQ ID NO: 10232 - DNA, 165 bp, Photorhabdus luminescens
ctgacaccgttactcgcttaccggtcaacaaatgcgctggagaatagtcagcaggatatcgcacgcctgctggatttgggacgcaataccattaagcaacttgaagaattggtattgatgtataaaaaattaccttcattcttatcaccactttacagcatttaa

SEQ ID NO: 10233 - DNA, 1680 bp, Photorhabdus luminescens
atgggaaaattaccgttttatcaccgcagcctgactgggcttattctgctgacaatctccgcactggcacaggcggcaattcctgtcagctcggcggatcaagaaactatcacgcaacaacaaaaagccttgttgcagcaagcccaacaacagcgggaagcgctgcgtaacaatatcaccgtatccccatcccccgttttaacgtcggatgcagctgaatttgtttgccacaccattcaacagattgaatttgtgggtgcagaaagcttgtcaaagtcagtcaaacagaacgtgattcacccttacttatctcattgtttaactttgcaagagattaatgagctggtgcgtaaagtatcgaatgcctatatcaaacggggttatgtcacttcccgtgccgacctcaaagcgcaggatttatcctccggtaccctcatgattaccgtgaatgaaggcaaaattgagtcaatcagccttgatgatgaaacaccatactcactcaaaatggcctttccgggcatgattggcaaaacactcaatctgcgagatattgaacaaggcatggagcgcctgaaccgcctgccctcccaacaggtcgccattgatattcagccaggaaaacaacccggttattctgcggttatcttaaaacgaacctcgacacgtttaccgatcagtgccagcttgggtggggataacagtggccagaaaagtaccggcaccgggcaaatcaatgccagtgtgaacctggataatccattacatctcgctgatcagtggtcattgtctgccagccataacagtgattttcgccatagccaccaaaaccgaagcctcacttctaatgtaacgatcccttatggctactggttgttcagttatcagtatgcgtggaatgactcttttcagaatattccggctgactcgcaagcctatcgctacgaaggcgacagccagacgcaccggctggcaataaaccgggcgttataccgtgatggcgaacagaagctggcgctggatctgggattgacgcgccgccaaacgaccaatttgctggcaggagagaaattatccatcagcagcccgacgttaagctctatcaaccttggcattaactacagttcagtactggcaggtggctatatcacgtttaacccggcaatcagccacggtttaccggtgttcagtgcgacaaaagaggatccccatttcccggatgctccacggagtcaattccgtaaatttagcctgagtgccagctattttatgccagtcacggattccatttattacctctcatccctttacggccagaccacacccgacaacctttacgccagcgaacgcctctcgctgggaggacaatattccgtcaggggatttaaagagcaatctctcaccggcaaccgcggtggatattggcgcaatgagctgaactggcgaatggcagagcttcctgtactgggtgaactcaccttaaccggggcgttggatacgggatggttacgaggaaaagcaggacaaattgatggcggtaatgtcactggcaccgcacttggcttctcactaacgaaccgccgattcaatcaggcgataactgttggcaaaccactcacttaccctgaccacctgaaaccggctcactgggtggtttactggtctgcatcactgattttttaa

SEQ ID NO: 10234 - DNA, 642 bp, Photorhabdus luminescens
ttgaagtttcttgggtataaacataaaacacaatatgccatgatgattaaacttaataaaaaacaggcgaaaaaagggttttacaggttttacaggttttacaggttttacaggttttacaggttttacaggttttacaggttttacaggttttacaggttttacaggttttacaggttttacaggttttacaggttttacaggttttacaggttttacaggttttacaggttttacaggttttacaggttttacaggttttacaggttttacaggttttacaggttttacaggttttacaggttttacaggttttacaggttttacaggttttacaggttttacaggttttacaggttttacaggttttacaggttttacaggttttacaggttttacaggttttacaggttttacaggttttacaggttttacaggttttacaggttttacaggttttacaggttttacaggttttacaggttttacaggttttacaggttaaaactatcgttaaaactatcgttaaaactatcgttaaaactatcgttaaaactatcgttaaaactatcgttaaaactatcgttaaaactatcgttaaaactatcgttaaaactatcgttaaaactttataccgattaa

SEQ ID NO: 10235 - DNA, 1026 bp, Photorhabdus luminescens; identical to SEQ ID NO: 9240

SEQ ID NO: 10236 - DNA, 1434 bp, Photorhabdus luminescens
gtgaaatacgactttattgtcgttggttccggggcaattgcaggttcaatcgcctatgagctggcaagcagaaatctttcggtttgtagggttggagagactgatcgaactaatgctgcttcgaaagcggcgggtgcaatgaatgggtgttttggcgaaattaccagtggtttattagcgagtgaacacggtaagttgaaattgaatatggattgtatttccaaagagctttggccggcttgggcgcaacggttagctgactcttccggtgatacccgatcactgttcacggctaaaggcactcacgtgatactcaacactgccgggatggaagagattgacagtatcaattatgacgctatcgaacaaaccctaaacgattatgcggcaccttatgaaaccattgatccgcgtgaaattgagtggttaaagcccaacgatttagtgcgcccgctgcgtgctttgtacatccctgatgagcatgcgctgaactcgcatttattgctggaaaagctggatgcggcattggtggctgaaggtggaagtcttaaagaagagaatgttaagtgtgtgttgattgaagagggtttagctaccggtgtcgaattgctgagtggcgaacgtttaatggcagataaggtcgtcgtggctgccggtgcgcactcgttggatctgttatcaaatataccttctattgttcgccaaattccgccaatctttgccggctatggggtatccattctggtcaagatgccgaaaggcagagaattaccgacttcggtcatccgtacccctaaccgggcatttgcctgtgggctgcattgtgtgccacgtggtgatggtgtgctgtatcttggcgcgaccaatattctgtctgaaaaaccacgcagtcaggcactgatttctgatgtgcagttcttgttggattgtgcgttagatcagttagatattaacttacatgatgctgagatcctctcaattcaggttggtaaccggccaatcccggctgatgggttcccgttgatcggcgaatgcggcgtgaatggtctttggttggcgaccgggacttaccgtgatggcttacatcaatcaccgttattagcggattatgtggctaatgctttgacgggagtagaaaatacactgattaatcttgatgatttcaatccagttcgtcctccgttggtcggcttctcccgtgacgtgatggcgaaagagactgctcaacaaatgtttgctaccggttacgaatatcgttgggatattaaaccttactggctgccactgctgaatgaagggatgatgcgcaattatcagaatttaattgagtctcttcaccctcaattcacgccaccgccagagttggttgccttctcccatatttatcaatccatgcgtgaacggttacgcagttattatgaggcttggtcatga

SEQ ID NO: 10237 - DNA, 852 bp, Photorhabdus luminescens
atgagtttttcgctgaaagatcaagttgtcattgataacgccaggaaattactgtcagaggccgacgtttgggatgtggaaactgatctcacgtgcctgattgaccgttatctggaaagacgttgtaaggaccgcgcccgtgatgaatttatgcttgcggttcatgaacgctgtaaccgaataccacttgggcatattgtcggtactgtggattttgatggattgcctctgacggtggggaccggggtatttattccgcgccctcatagtcaagttattcataaatggctggagaatgaatatcaagcgcctcatggggctgtggtgctggacttatgctccggtagtggtgccatcggtttagctattgctaaacgtcgcccagatttaaaggtcacttgtgtcgaatatgatgatgtggcttttcaatacctgacgcgcaatatctatcggttggcgaattgggcgattaaagccgatgcattaaaagcagatttacgggattggcaagcattttctcaatttaacggatcggtagcgttgattgtagctaatccaccttatgtgccagaacagcaggaaatattaccggaatgggaggaacatcatccttatgcatcggtgtattcgggggatgatgggcttgacttagcacggttgattatcaaacaagctaaacagctactgcaatcagaaggttggttagttattgaacatggtgaaagtcagggagagagtgtcagagcattattttcagatgttggcttctcctcggtacgaactattatcgatgaagatatttctgacacaacgggcagttcggtaatcactgttggttgtaagcgcatttga

SEQ ID NO: 10238 - DNA, 1275 bp, Photorhabdus luminescens
atggatgtaaaacataagcaggactggatgacaattcgtcggtcacggacaaccggtgccttagcgcaagctatcgacgaaggtttgaccagtttcactgtggttgaacgtcaaggtaagcaaattactacggaggaaggcaaagtctttactgaatttgtttcctgctcttatttgggattagaacatcatcctgcgttaattgaagcggcaaatcaggcaatggctaaaacagggatacatttgtcatcatcccgtggagcgatgcgcccgcaatatttggggcaattggagaaactgctggaagagatttatcaaggtggtgccgttgcggtgtttacttccaccagtaatgttcatcttggtgtattgccgttattggggagtggctctctacctaactatcctctttctcggcctgtacattggttgatggataaaactgctcatgcctctatgcaggttttacgcggtattctggagcagttcggaccggtatcacgggttgatagtgctgatgcgcagtcagtacagcaagctttgcagaactgtaaggagaatcagcggacacctatcctgctgattgatggtattggttcaatgaatggtttaattccggttgcagaattaacgcgacagttggctgctgctggaggctatgtctatgtagatgatgctcatggtatttccattatggggcgtcatggtgcgggttatgcttttgctgcacttgaccatattttgccatccaacctcatacttgcaggttcattatccaaagcatttggtggtgccgggggttttgtggtggttgcaggtgccgatgatgtcgaagtgatcagtaccttagcgaatcctctggtttttggtcattcgatcatggtgccgatgttggccgctaacgttgcctcagcaagacttcatctcagccttgagatagacatccggcaagagcagttatggaacaacatcaatctgtttgattctctgatggagaacagtttgatgaatgcgggtgtgcaatctcccgttcgcggcgctttattcgaaaatgaagcggaagggcttgaagctgctcgtttgctgcgtgataacggcatcttattattcccggtattttatccactggtcccggatggcaatgcaatgttacgctttgctttctctagtgagcatcaggcaggtgaaatcaagcagctagcaaataccttatttgaaataagggaaaaagggctgaattgggttgagccacaggctgtggttccacaggtgtaa

SEQ ID NO: 10239 - DNA, 360 bp, Photorhabdus luminescens
gtgacgaagatcaaacatatgactcaagcaataataaataaacaggaaatattacaaccttacagggaatctttggatgttattaatatgcagattttggcactgctttctgaacgtatgaaagtttgtatgaaaatcgctgaggtaaaagcggggcaggatattccgatgatgcagccacaacgtattacctcgttattgaatatgttgcgggataaatcaaccgattttgggttacggcctgaatatactgaatcaatatttcaactggttattgaagagacttgccgtcgagaagaagagctgattgaccagttgttacacgagaaagtaaagaataatgaaaatactgctcattga

SEQ ID NO: 10240 - DNA, 2019 bp, Photorhabdus luminescens
ctgtatgaagtgacgggcagtgtgccgtccgtagtcaccaattctttgacttatgaagagttaacgatagacgaatatgatgcggtagtcctttctccggggccaggacatccggctgaaagcagtgattttggggtctgtgctgaagttattgcacatgccaaagtgccactgttgggtatttgtctcggtcatcaggggattaacctggcatttggcggcgttgtagaacatgcccccaatccggtacatggctatcgcagtcgcatcaggaacactggagaaggattgttcctcggtttgcctgaacagtttgaagtggtcagatatcactcgttggtatgtacccggttgcccgacaatctgaaatgtactgcctggactgatgatggcttaatcatggcaattgagcacaccgaaaggccgatctggggggttcaatttcatcctgaatcgattgattctgaatatgggcgtgagctactcagtaatttcgtgcggatagcggagacgtataaagagaataatgaacaggaagttaccgctcagaatatatgtactgatatcaatgaggcttatcttgcagtaggtggaagacaagatctcaacctgaattatcgtgaatgtaaggagatagtcgatcctgaatccttgtttattcaacgttatggcaatgatacgcatgctttctggcttgatagtgaaaattctgatagacccaatgcccgcttctcaatgatgggcagcggtaatgaacaaggtgctgtcagacttgaatacagtgtacagactgagaatttgcgtttgatcggtcctgatggcgagaggattgttcagggagattttttctcgctgatgtctcagttgcttgatgtggtggcaatttcgacaccaaaatcgatgccattggtatttaaaggcgggtttgttggttatttaggatatgaattaaaggcgctgacaattggcagcaacaaatatcgttcagaacatcctgatgccagcttaatatttactccgcatttttttgtcttcgatcatcagcagagtaaactttatgaatgttttatcacaccaatagggcagccacatcattggtcaccggaacttttcgttaccaatacaaaaaataccggtgaagtgatacctgactttattcctggcgctgttgatcaaaataagatttgtctggaatatggcgctgagaaatatatggatggaatccataaatcactccaatacatcacagatggtgagtcctatgaaatctgtctgacgaatagggccaagatgacttattcaggacatccattggacgcttatcggcgtatgcgtcatgccagtcctgtaccttatggcgcttatctggcctgtggggatttttctgtactcagtgcatcaccagaaacgtttttacgtattgatgacgccagaaatattgagtccagaccgattaaggggacccggccacgcggaaaaacggcagccgatgatcagcatttgcagatggaattgagtcagtctactaaggatagggcagaaaatctgatgatagtggacttagtgcgccatgatcttaatcaggtatgtcgtccaggtagtgtgcatgtacctgaattatttaaagttgagagcttctcttctgtacatcaattggtttcgaccatacgcggtcaattatgtgaagaaacgtcatccatagaggctatccgggcatgttttccaggaggatcaatgaccggcgcaccgaagaagcgcacgatggagattattgatgctttagagtcatcggctcgtggtgtttactccggtgcgcttggatggttatctttcagtggtgaagtggaattgagcattgtgatacgcaccgcggtattacatcaagagtgtgctgaattcggcattgggggggcaattgttgctcattctgatccttatggcgaatttgaagagacattggtcaaagcgagtgtgccatatttcagttttagtcatatggcggaggaagtgtgtgagtaa

SEQ ID NO: 10241 - DNA, 888 bp, Photorhabdus luminescens
gtgagtaaccataaagtggtcatccttggtgggcaaggcgctattggttctttattagagcgcctttttactcaatatggtcatattgtatacagtgttgacaaacgaacgcagggagtgcgttctcattactatcattctcattactgtcagattgatatcttaaacccggctgctgatgttggagcggttttgagtggggcaaaggcggtcgtctttgccttaccggaagccgtcgccatacaagcgttgccttgggtgttatctgctattggtgatgatgtacagatcgtgtcaacctgttcagttcaggcccctttttattctgcattaagagctgccgcccccgggcagcctttcattggtgttaacccgatgttctcgccatctttgccggagcaaaaaaggccagttgcagtcattctcgataactgtcatgttagtgaacattggattgagcgggtattgatgcaggctgatatgcgtatcagtaggatgacgccggaggaacacgatcaggttatggcgctttgtcaggctttgccccatgccgcgatactgatttttggcttggtgttggcgaaaagtccgttagatattcgtaccttggcagctattgcgccaccgcccatgcgtaccatgctggcgttattatcaaggatcttacgcaatccaatagaagtgtactgggacgttcaatatgaaaatccgatggctgccgaaccgcgtcaggagttgctgcatgccatacaacagttagattcgatagtacaggctggcgatcaaactgaatttggcaataacctcagagatattgcgcaacaactgggggaacagcttgatatcagtgctgctgattgccagcatattttttcaacgcttgaatga

SEQ ID NO: 10242 - DNA, 1533 bp, Photorhabdus luminescens
atgtcgttaaatagagttgctgaggctaacgggcgggcaggactcagaaattggctaggattactgatattgatgttaccagtattgctagtgactgtggacaatacgatcttaagttttgctttaccaaaaatagctgaagctctgggacccagtgcaagccagcaattatggataattgatgcttattcattggcattggctggtttgctggtatcaatgggaagtattggcgatcgtgtgggtcatcgttcattactgttatttggatctttggggttcacggttatttcggtgttcacagcactgtcaacttcacctgaacaattgattttagggcgagccgtacttggattttttggtgcgatgctgatgccttcaactttggctttgatcagcgttctttttgaggatcgtgaacagcgtcgattggctgttgctatctgggcgacaacattaactatcggttcggccgtaggtcctgtagtgggtggtgttctattacaattcttcgattggagttcaatttttctattggcagtaccggtattagtgccattgttgatcttcggaccgatgttattgccagagtccgataaaaaacagacgggcattatcgatgtgtatagtgttctgttatcgatcgttgctatggttggtattgtttacgcgattaaacaccttgctagtgatgggtttgaaataagtgtaatactcgaactgtcggttggtcttattgctggtgtgctatttgttcgccgacaacagcgtctgcctgtgccgttgatggatctttctctgttccgcaatggtatgttcacgggttcgattattgttaacttactgagtttggcattgctggttggttttgtcttttttgccacacaggtcttgcaaattgtgctcggtatgaagccgattttggctagcctggcattggttcctggacaaataatggcaattgttatgggtatggcgatagtgcctattgctcaacgggttccggctcattatctggtgccaattttgctgagtattgcaggtattgcatttcttctggtcgcgagtatcggcagtgatttagtcactctgattgttgctttcgcattattagatattagtgtgggggcaattgcttcggtgtctaacgatttggtgctttcgtcagtaccctcctctaaagcaggggcggcatcatcaataagcgaaactgcttatgaagtgggtgttgtacttggtacgactattctggggggattggttactgctttctatcgtatgacattgcaattaccaaatgagatctctcaggaacagacgggattagctttagagactttagcgggggcttacgttgtcgcgaattcattagctgaatcagaggggcagaagctgatgacagcagcggcggaatcattcaccagcgctattcatatgatgagctggatgacagtggtattgaccgcaggagtggtattgctcgcttggcgtttgctgaaagctccgcagaaagaacaagtgcttgagtattga

SEQ ID NO: 10243 - DNA, 1296 bp, Photorhabdus luminescens
atggataaaataagaacggttgctgagactttggcaatattatatcagtatcattatccgtttggtctggaacgacagccgaagcaactaaagacctcggattttgacggtaaggtaatattctccaacgatccagaaacagcgactgtgccaccggcattttttacggtacaaaccatacaagagttgaaagcgcttggcggtgtacctgacagtgagtatggccctggaaaaatggaaccccatcatccgttaccggagccgttttctgctgaacgactggcaaatgtcactggtaatcatattgatctgtgcaaagcttttagggcctatatctatagtgattctgctttagtcaaagattatgaagaaatacttaatgctaagcgcttcccgatgaaggttgcgttatacagtggcgagaaaatgactatctcctccgataatccattggttgttgaagataaagatgattatggtgaaccggttgtcttggtgtatgagcagataatcattgaaccgggaggtcaaattatttaccgcactaatggtcgaatcgaagctaacactattgtagggaatgaaaatactggaaaggagaatgttgtcaatagaggcagtaatggcgtcgatggtcttgatggtgcgccaggaaatcaaggggctaatggcagtgatggtaaagatggtaaagatagtaaaaatggctgcttaattagcgccacatcaggtactgatggagccagcggttctgtcggaggattagggggggatggtgcagcagctggaaatgcgaatgacctgactgttactactagtcaatcttttactggaacagtaaatgcggcaacgataggtggtaacggtggtaacggtggaagaggcggtcttggggggcgtgggggtaatggggggaatgggggtaattggggcaatggaacaatcaagtggtgtcctgctggggcggcagggaatgggggcactggaggaaatggaggcaatggaggcagggggggtaaaggtggggacagtggtaacatatatattaattactctgacggtagtccagtacttcaggttgtgtcaattaatggtcttggtggggaaggtgggaaggccggttggggaggaatagggggtgaacctggaaatagtaccagagtactcggtgtacatggtttgcagggggactatggtaaagatggtcttaaaggagaatttggagatgacggtaacaccggcaagatatatgtcaacggtcatgaacgggaatctgatcggaaacttaatcgctag

SEQ ID NO: 10244 - DNA, 99 bp, Photorhabdus luminescens
gtgctgagtatgaatccgattttgcattggttcctgggtaaattaatggcgattgttatcggcatggcaatagtgcctgttgctcaatgtgatttttga

SEQ ID NO: 10245 - DNA, 1305 bp, Photorhabdus luminescens
atggataaaataagaacggttgctgaaactttggcaatattacatcagaatcatcatctgattggtgtagaacggcagccaaagcaacttaagacctcggattttgacggtaaggtaatattctctaacgatccgaagacagcgactgtgccacctgcattttttacggtacaaaccatacaagagttgaaggcactcggcggtatacctgacagtgagtatggccctggcaaaatggaacctcatcatccgttacctgaaccattttctgctgaacgactggcaaatgtcacgggttatcatattgatttgtgtaaagcttttagggcctatatgtatagtaattctgctttagtcaaagattatgaggaaatgcttaatgctaagcgtttcccaataaagattgcgttatacattggcgaaagaatcactgttaccgcagatgcaccattgcttgttgaagataaagatgattatggcgaacccgttgtcttggtatatgaccagataatcattgaaccgggaggtcaaattatttaccgcactaatggtaagatcgaagctaatactattgtagggaacagcaataatgataaaaagcagagcattatcagtaaaggctctgatggaggcgatggttttgagggtgaacagggaagtaatggggttaatggcagcaatggtaatattggttcagagaataaacatggttgctctgttaaatccacaccaggtactgatgcaactggcggttcttcgggagcaccagggatggatggcaaaagaggtggcagtgcaaatgacgtaattattaatgttgacatttttactggagtagtcaatgcggcatcgataggtggtaagggtggaaagggtggatatggcggtaatggcgggaatggagggaatggtggaaatggaggagctgcaacaaacaaatgtagtgctggatatggaggaaggggaggggatggcggtaatggaggagatggcggtaatgggggtaacggtggggacagtggtaacatatatattaatttcactcagggtcagccagtaattaatgctctgtcatatagaggagatggcggtaatggagggggcggtggtaagggaggaataggcggagtaggtggtgttggtagtagaggattaaatgctaatagttatcttggagtgtctggtgaagcgggtaatgatggagaatccggcaatgcagggacttctggcaagatatatgttaacggtaatgcacggcagcatagtgataatcagactttagactggcttgaagactataaataa

SEQ ID NO: 10246 - DNA, 606 bp, Photorhabdus luminescens
atgtcgttagcagtatctgtcgttgattttggcccctttaccaatatcgtcggttttttaatggagttggataagttaaagaaagttcagcggcgaattaagttactggataaccatcgtcaggaaaattcagccgaacatagctggcatttagctatcgccgcaatgagttttgcgccatatgcacaagaagtagatatccaacgagttatccagatggcattaattcacgatatcgtagaaattgatgctggtgatgtgatggtttacgatttgacggctcgtgaagctattcatgaacaagaagttaaagccgccaaccgtctttttggtttactccccgaaccacagaaaaatcattttatgtcactttggcaagagtatgaagcaggagaaagccaagacgcccgtttcgccattacactggatagactaatgccgattctgatgaatctgcataataaaggacagagttgggtagaaaataatattcgttttgagcaggtgattaaccgcaataaatttattgccaatacctatcctgaattgtggcaatatctgctgccacaattggaaactgcacagaagaaaggttggctgaaataa

SEQ ID NO: 10247 - DNA, 990 bp, Photorhabdus luminescens
atggcttataaaactccgttctcttcacaatttccattgtcttcatcgacccttcccctgacattaatatcactagatgactggggcctggtaaccgcaactggaccggatacagaaaaatatctacaaggtcaggttacagcagatatttccgcacttgcaacgaatcagcatgtgcttagtgcgcattgtgacgcaaaaggcaaaatgtggagtaatctgcgcctcttccatcgtggtgaaagctttgcttatattgaacgtcgcagtgtgctggaaaatcagcttacagaattaaaaaaatatgccgtattctccaaaattgctcttgctcaggatgagaacgcgctactgctcggtgttgcaggtaaaaactgccggcaagcattaagcagcttcttcccaaccttgccggatgcggataacgctgtcgttgcacatgaagccaccacactactccatttttccttgccgtctgaacgtttccttctggtaacaaacaccgcaaccgctgaacagttaacagaaaaacttcaagctcagcttaataacagtgaacagtggttagctctggatattgaagctggcttcccaatcattgatgccgcaaatagtacacaatttattccccaagcaactaaccttcaggcattggcgggaggggtatgctttaaaaaagggtgttataccggtcaggaaatggtagcccgtgctaaataccgcggagcaaataaacgtggcatgtactggctggctggcagtgcctctaaaattccgatggccggagatgatttagaatggcaattaggagataagtggcggagaacgggtaccgttttggctgccgttaagttgaataatgataatgtctggatacaagtcgtcatgaataatgatatggaaagtcatagtgtattccgcgtccgtgacgatgaagggcattccctcactattcagcctctgccttattctctcaacgaagaaaaatag

SEQ ID NO: 10248 - DNA, 273 bp, Photorhabdus luminescens
ttgaacatggatattgataataaagcgcgtattcattgggcatgtcggcgtggaatgcgtgagctggatatttcaattatgccgttttttaagtatgaatatgactcactcagtgatgatgataaacgactttttattcgcttacttgcatgtgctgatcctgatctattcaactggctaatgaatcatgggcgtccagaagatgaagagttatttcgcatgattaaacttattcagaatagaaataaagatcgtggtcctgtggaagtgtga

SEQ ID NO: 10249 - DNA, 417 bp, Photorhabdus luminescens
gtggtcctgtggaagtgtgatctcagggtatcttggcatacccagctaatttctacctgtgttcatggtgcaatagcgcttatcgtactatttgctccgtggcctgcggatgacgctattttctggattttctggcttcctttggtactgttgattattgccagttgggggcgtagccagaaaaatatccgtaaatctcaagggcttttagttcttctcagtgataataagttgcaatggaagaagcatgagtggcaaattatccggcggccgtggttgtgtcgttatggcgtattaattacggctcaatctttttataaccagaaaaaaatccgtttatgggtcgcatccgatggtatgccacaggatgaatggaggaatattaatcaactgttgttgcaatatcctgatatctga

SEQ ID NO: 10250 - DNA, 522 bp, Photorhabdus luminescens
atgatgaagattggtcttttttacggctcaagcacctgctacaccgagatggtagcagagaaaatccgcgatatccttggcgaagatttaattgatcttcacaatatcaaagagacagcacctaaattaatggaaacgtattctgtcctgattctcggcatcccaacatgggattttggcgaattgcaggaagattggctggttatttgggatcaaatcccttccctcaatttacaagggaaaattgtcgccatgtatggtatgggggatcaaattgattacagcgattggttcctcgacgctctcggtatgctatatcaccatttacgcccttcaggcgtgcattttattggcttctggccaactgaaagctatgagtttaccagcccgaaaccattaacggataatggctcacaatttgtcgggctggctttagatgacgtaaaccagtatgaacaaactgatgatcgtttatcgcaatggtgtatgcaaatcctgcaagaaatggagcctctactttaa

SEQ ID NO: 10251 - DNA, 912 bp, Photorhabdus luminescens
atgtcaaaacaaccaactcagttgactaatccactgatagaacaatttcttgatgctatctggttagaacatgatcttgcggaaaatacgcttgcttcttatcggttggatttgcaggcattggataactggttgatacatcatggtcataatttattatctgtccagacgatagatttgcactcttttctggcagaacgcgtggatggaggatataaagccagtagttcggcgcgtttactcagtgccatgcgccaattgtttctctatttttatcgggaaaaaatgcgggaagatgatccgacagcacttttgtctgcaccgaaattaccaaagcgattgcccaaagatttaagtgaaaagcaggtagaagatctactcaatgcgccctgtacagatcagccagtggaattaagggataaagccatgcttgaagtgctttatgcctgtggtttgcgggtatctgagttagtgggattgacactttccgatgtcagtttgcgtcaaggcgtggtgagagtgattggtaaagggaataaagaacggctagtgcctttaggggaagaagcaatttattggctagagaattatctggaatatgggagagttgggctgttaaatggtgcaacgttggatgtcctttttcctagcaaccgagggcgacaaatgacccgacagacattttggtatcgtattaaacattatgcgctgttggctggaatcgatactggacggttatctcctcatgttttacgtcatgcatttgccacgcatttgctaaatcatggcgctgatttgcgagttgtgcagatgttattggggcatagtgatctatctacaacacaaatatatactcatgtagcaacagaacggctcaaattgctacatcaacaacatcatccgcgagggtga

SEQ ID NO: 10252 - DNA, 708 bp, Photorhabdus luminescens
atgaaaaaaagcgtgttatgtttccctcttttgctggcctggtttagtggaaatgcgcttgctgatgatggtgctgtccatagaataatgcaaaaactagggataaaagcagaaagcatccagccatcacctatcgttggtttaaatacggtagtgactgagcaaggtatcatttatctatctgatgacgggaaatatttattacaagggccaatttatgatgttagtggtagcgctcctgtgaatgtcagtaatcaattattgatgaaaaagctggaagcaatgagagatcaaatgatcatctacaaggcgccagaagagaagcatgtcgttaccgttttcacggatattacctgtggttactgccataaattgcatgaaaacatgaaagagtacaataaactgggtattactgtgcgctatttggcattccctcgtcagggtatgcagcaccaatctgctaaagatatgcaatctatctggtgtagtgcaacaccgcagaaatcattagatgctgcgtttaaaaatgaagatgtttcgccaattaagagctgtaaggtggatattgctaaccagtacaaattaggtctccagtttggtgtgcagggaacgccggcaattgtccttaaggatggcagcctgttaggtggatatatgccaccagaggctttggcagcggcactggcgcaacgtggtaaatcagtttag

SEQ ID NO: 10253 - DNA, 1734 bp, Photorhabdus luminescens
gtgaatattgaaacacaacttcgccgccgcttggcggtgaatgacagtcaccttccacaacagattcatccactactgcgtcgcttatatgccattcgtggtatccagcaagctaatgaattggagcgtggtgttcaaggattattgaattatcagcatctaagtggtgtggaacaggcggtggcactcttgttgactgcacttcatgaacactggcgtatcgttattgtcggtgattttgatgctgatggggccaccagcacggcattggcgatccgatcattacgctcgatgggatatcgccatctggattatctggtaccaaatcgttttgacaatggttatggtttaagctcacaggtggtagaagaggtcgttaaaaaaggcgctgacctgattattaccgtggataatggtatctcttcccatgaaggggttgcggctgcccatcagcaccgtatgaaagtgattgtcacggatcatcacttgccgggtgacgttttgccggcggctgatgccattattaatcctaatcttgccgattgttcgttcccgtcgaaatcattggccggggtgggtgtcacattttatctgatgtctgccttaagggcggcactgagaaaagatcaatggtttgaaaagcaaggaatagcgctgccgaatctggccgaaatgttggatttggttgcgttaggaactgttgccgatgttgtacctttagataccaataaccggattctggtttatcagggcttgaaccgaattcgtgcaggacgctgttgtgcggggatacgtgcattattggaagtttccagccgtgatgcttataagctgacagccagcgatttggggttttttctgggaccaagactgaatgccgctggtcgccttgatgatatgtccattggcgtcacgttattgctcactgacgacatagcaaaggcgcgtcagatagcttgtgaattggacagtcttaaccagactcggcgtgaaatagagcagggaatgcagcaggaagcactgcaaatctgtgacaaacttgaacgtaccagcactgaactgccttatgggctagcgctctatcatccagaatggcatcaaggggtagtcggaattttggcttcccggattaaagagcgttttcatcggcctgttatcgcatttgcaccggccggtgacggtattttgaaaggttctggtcgttcagtgcagggattgcatatgcgggatgcgcttgagcggcttgatactttgcatccgggtttgatacttaaatttggtggtcatgcaatggcggccggtttgtcacttgaacaggataaattcgaacaatttcagtatcacttttctacgctaatggcggattggttagatatttcgcaacttgaaggtgttatctggagtgatggtgaattagcaattaatgaactgtcattggacattgcagaaatgttgcgtgatggcggtccttggggtcaggcattcccggaaccaatttttgacggtaaattcaaactactgcaacagcgcattgttggagagcgccatttaaaagtgatagtagagccattaaacggtgggccgatgctggatggtattgcgttcaatatcgatcctacccgctggcccgataacagtgtccgcgaagtagaacttgcctataaactggatgttaatgaatttcgtggcaaccgtaatgtacagcttttgatccaacatctctggccctattaa

SEQ ID NO: 10254 - DNA, 1035 bp, Photorhabdus luminescens
gggggtatctttgactacgatgtcaaaaaagagcgcttagaagaagttaatgctgaattagaacagcctgatgtttggaatgaaccggagcgggcacaggctttgggtaaagaacgctcctcattagaagagattgtcgaaacaattgatcagcttgagcagggactggaagatgtacaaggtttactggaactggcagtagaagctgacgatgaagagacttttaatgaagctgtggtagagctggagcagcttgaagaaaaattgggtcagttagaatttcgccgtatgttttctggtgagtacgacagtgctgactgttatcttgatttgcaggcaggctctggtggcaccgaggctcaagattgggcaagtatgctgatgcgtatgtatctgcgttgggctgaatccaaaggctttaaaacggaaatcattgaagaatcagatggtgaagttgctggcttgaaatcagcgaccattaagatcatgggcgattatgcttatggttggttgcgtactgaaaccggtgttcaccgcttggtacgtaaaagcccatttgattctggtggtcgtcgccatacttcattcagttctgctttcatctatcccgaagtggatgatgatattgatattgaaattaatccggcagacttacgtattgatgtttatcgcgcgtctggtgcgggtggtcagcacgttaacaaaacagaatctgcggtgcgtattacccatattccaaccaacattgtgactcagtgtcagaatgatcgttctcagcataaaaacaaagaccaggcgatgaaacagctaaaagcgaagctgtatgaactggaaatgcagaaaaagaacgccaataaacaggaaatggaagagaataaatccgatattggttggggtagtcaaattcgctcttatgttctggatgactcacgcatcaaagacttgcgcaccggcgttgaaactcgcaatacacaatcggtgctggatggtgatctcgataaattcattgaagcaagcctgaaagctggcttatga

SEQ ID NO: 10255 - DNA, 1515 bp, Photorhabdus luminescens
atgtcacaacaacaacagggtgcggaacaggcccccgatttaaataatgagctgcaaactcgccgcgaaaaacttgccgctttacgggagaatggaattgcattcccgaatgatttccgtcgtgaaaatatttcagaagatttgcacgcgaaatacgacgacaaaactcaggaagagctggaagcactgaatattgacgtgacggttggcggtcgtatgatgacgcgtcgcattatgggtaaggcttctttcgtaacgctacaggatatgggcggtcgtattcagttatatgttgcccgtgacgatctgccggaaggtatttataacgaacagtttaaaaaatgggatctgggagacattctgggggctcgtggcaaactgtttaaaaccaaaaccggtgaactttccattcactgtactgaactgcgcctgctgacaaaagcgctgcgtccattgccggataaattccacggcttggctgatcaggaaactcgctatcgccagcgttatctggatctgatcgccaacgaagaatcgcgcaaaactttccaaattcgctctcaagtcttattggccctgcgtagctttatggtcagtaaaggctttatggaagtggaaacacccatgatgcaggtaatccctggtggtgcggcggctcgtccatttattactcaccataatgcgctggatattgatatgtatctgcgtattgcgccggaactttacctgaaacgtctggttgttggtggttttgaacgtgtctttgaaattaaccgcaacttccgtaacgaaggcgtatctccgcgccataaccctgagttcaccatgatggaactctacatggcctatgcggattacaaagatctgattgtcctgatagaagagctattccgtacactgacgcagaatattttggggaatactctggttaaatatggtgagcaggaattcgatttcggtaaaccatttgcccaaatgaccatgaaagaggccatttgcaaatatcgtcctgaaaccaacatagctgatttggatgatatggataaggtggtggctatcgctgaatctcttggtattgaagtggaaaaaggttggggccttggtcgtgttcagtgtgaaatttttgaagaaacggcggaaagccacctgattcaaccgacatttatcactgaatatccggcagaagtttctccgctagcgcgtcgtaatgatgcaaatccgtttatcactgaccgttttgaattctttattggtggacgtgagattggtaatggcttctcggaattgaatgatgccgaagatcaggcggaacgttttgctgagcaggttcgtcagaaagacgaaggtgatgacgaagccatgttctacgatgaagattatgtaacggctttggaacacggtatgccgccaaccgccggtttgggcattggtattgaccgtatgataatgttgttgacagatagccataccatccgtgatgttattctgttcccggcaatgcgcccgcagaaataa

SEQ ID NO: 10256 - DNA, 624 bp, Photorhabdus luminescens
atgaaagaaaaacattggtcaaaaattcaattcctacatgaagctgtaactaatcagagtattgtcatcaaaggaacccatagctattatagcgattgctggagtggcggttttgaagaatctgtcgttcgctatttatacggtgataaaatcagtcttcaatgggagtctaagtggccaattgataaattgtatattggcgattatgtttgcataggtgctgaaactatcattcttatgggtggaaataatacgcacagagcggattggttctgtttatatccattcatggaatacatcgaagaggcatacgtaggcaaaggtgacacgcatattcatgatggcgtatggcttggcatgcgttcaatgattatgcctggcgttactattggtgaaggcgctatcgttgctgctaatagcgttgtcactaaagatgttgagccatatagtattgttgctggaacgcctgctaaattagttaaatatcgctttgcgccgcacattatcaatgagctacttgcgttaaaaatatatgattggtcagaagagaaatttaatgctttaaaaccctatctctgtgcttcggatattagggcattaaaatctgctgtaagatcatattaa

SEQ ID NO: 10257 - DNA, 1008 bp, Photorhabdus luminescens
atgaaaagaaaaaatacaccgacgccacatgatgctatttttaaaaagtttttaagtcatattgatactgccagggattttctagagatacacttacctgccacattacgggcagtttgtgatcttgatacactgcgactggaatcggggtcatttattgaggacaatctgcgggtacattattccgacatcttgtattcactaaaaactacgcagggtgagagttatgtgtattgtgtgattgaacatcagagttccccggataagatgatggcattccggctgatgcgttacagtatttcagccatgcaatggcatttggagcagggacataaaaaattgccgctggtcattccagtgttgttttatcacggaaaaatacggccatatccgtggagtaccaactggttcgattgcttcgatgcttcggctctggcagaagagatctattccagcgcgtttccgttggtagatgtgacggtaatcccggatgatgaaatcctgacgcacaaacgagttgcactactggaaatagtacaaaaacatatccggcaacgtgatatggcggagttacagcaagagctgaccatgttgtttgcgtatgattattatacatatgagctgctaaaaagcatgctaaactacatattactggtgggagataccgccgatccagaaggttttatccggcaactggcagaacagttcccgaagtatgaggaggtactgatgacaatagcgcagaagttgcaacataaaggacatcaagaagggcttaaggaagggcttcaaaaatgtcaagacgcacgcgaagaagggcttcaagaaggattacagaaaggtgaaaaaaaaggtgaaaagaaaggtgaaaagaaaggtgaagagaaaggtgaaaaacgggcgagtctgaaaatcgcgcgtgcattgatggataatggtatcgatcgtgaaacgataatgaaaagtacagggttgagccagaacgaacttgaacaaatacatcactga

SEQ ID NO: 10258 - DNA, 123 bp, Photorhabdus luminescens
ctggatttatgcacctatgaattagtcgttcttggaacagaaagtattgccgttattggtaaacgatcgatcgctgaaataaatctgtttaagttgttggcaaagctaaaacagattaattaa

SEQ ID NO: 10259 - DNA, 768 bp, Photorhabdus luminescens
atgaaaaacacatctaaggaacatcctgcggcattatcttcgttaataaatgcatcatctggagaaaaacccactctcgcttttgtcattttcccaggcatgacaccacttgatatgattggtcccgcgacagttcttggagtgggaggatggttaaatattgaatatgtctggcgcgatttacttccggtgcgtactgagctggcacatatatcattttcaccgagcactacatttgagcaattaaataaagtggatattttgtgtgttcccggtacaggaaatccttatgctttgcttgccgaattagacatgcttgattggatacataaagtgggaagtaaagcatcttgggtcaccagcgtgtgtacaggatctatcctgttaggggccgcaggcttgctaaaagggtatcaagcggcgactcattggtcgatgatagacgatctcaacaaattcgatgcaataccggttaataaaagagtcgttatcgatagaaaccgggtcacaggaggtggagtcaccgcaggtattgatttcggtttaacattgcttgctgaaatcaaaggtgaagaatatgcccaagcagtccaactagcgatgcaatatagcccagaacccccgttcaatagcggcatgccagaattcgccgacaaagaaataactcatgccactcttcaagctatattttccaatgtggaaaaacagacgcctgattacaaagaaatcttaattaaaagcgccaaaagaatatcagatatctactga

SEQ ID NO: 10260 - DNA, 972 bp, Photorhabdus luminescens
atgaacattaaaactctctattttctgatcttccccaatgtcaatttgctggacctttcagggccattgcaggtctttaccacagctaatgagctagcagagaagtttggtcacagacggccctacgctataaaagttgtggcttgtgatcccggacaggtaatgacgcaggctggaataactgtgcaggcagaacctctacctaagttggattctcccgccgatactctgattgttgcagggggcattggcgttgagtcagcggcgaaccatccgccattgcgtaattggttaaagggacatgcgtcgctggctaggcgtattgtgtctgtatgcagtggggcattcattctggctgcttgcgggttgcttgatggccgtagagtcgttacacactggagtagctgtgccgaactggcccggcgttacagtaaattgcgggtagaatgtgatcctatctttattcaggatggtccggtgtggacttctgctggtgtcaccgccggaatcgacttggctctagcattgctggaggaagatttcggtcataaactggcgctggatgttgcgcgggatctcgttatgtttctcaaacgtcccggtggacaggaacagtttagtgctccactggcattgcaaagcagtacgagtaaatttgcagatctgcacgcttggatgactaacaatttggcgggagatctttcagtggcaactttggccactcgtgccaatatgagtgagcgtagctttgtacgtcactacagccaacatgcagggattacgccagccaaagcggtggagcgattccgcttagaagcggcgcgtcatcttttggttgaatctactctgtcgctcaagtgcatagcctcccgttgcggtttcggctgtgaagatactttacgccgtagtttcttccgggcgttcagtagcactccacaggactaccgtaagcacttcaagacgacattttag

SEQ ID NO: 10261 - DNA, 1668 bp, Photorhabdus luminescens
atggcagaaacaccatcagcagaacgtgataaccgtgataaaccggtcatttggacagtctctgtttcccgtctttttgatctcttccgtgatatcacaccagagttcgatcatcaggccaatatcacacctatccaacttgggtttgaaaatgcggttcagcatattcgtcaacggttaacaactgaatgttgtgatgccgtgctctgtgccggttccaacggagcttatcttaaaagtcgtttgtcagtgcccgttattattgccaaagccagtggatttgattttatgcaagcattggcccgtgcacgacaaatcagctcccgtattggtgttatcacctatcaaaatacattacctgcgctagaagaatttcaacaacggttcaacctgcgtattgaacaacgcagttacgtaacggaagaagatgcacgggcccaagtcaatgcactaaaagccattggcattaaagtgattgtcggtgccgggttaattaccgacctcgcctatgaggctgaattggtaggtgtttttgtctactctgctgattctattcgccaggcattccatgatgcactggatatcgccagaatgaccacgctcagccaagcttcaatttctgcctatccaaccgagaacaatttacgtacccgccatactctcaatgatatccggggagattcagcagtgatggaacatgtgcgcaacactattatgctatatgcccgttcgcctgccacagtgctgatacagggggaaagtggcacagggaaggagctagtagcacaagccattcaccatgaatatgccctgcggtatggtcaggttgcgggtaaacatcaacgtccgtttgtcgccgttaactgcggtgccattgctgaatccctattggaagctgaattgtttggttatgaggaaggggctttcaccggttcacgacgtggagggcgtgcgggtctttttgaagttgcacatcgaggcacgctatttttggatgaaattggtgagatgccactgccccttcaaacacggctattgcgggtattggaagaaaaatccgttgtcagagtaggaggacaccgccccattgctgttgatgttcggataatttgcgccacacattgcgatttggatacctgggttcaagacgggcgttttcgaacagacttgttctatcgtctgagtgtattgcggatcaacattccagccctcagagaaagaggtcacgatattggtatattagcgctggaatatctgcgacgagcatttgctgcattaaatttgccggtatcacaatcaagagtgcaagagcttgctacctgtcaggaggcattgcaagcctatcattggcccggcaatgtccgggaactacgtaatcttatggaacggctcacgttatacctcagtgctcatccagagcatatcttaacaccagaattgatattggcgctttcaccggaacgccaatctatactcaagcaggcggaacaaagtatgaagtcttccccttcttcaattcaacaatcttcacttgttgtaccactttcagttcatgaaaccttgaaacggttttctggcaatcaccatgcaaccgcggaatatctggggattagccgtactacgttatggcgacgattgaagaaggagatagcaagagaaagagaataa

SEQ ID NO: 10262 - DNA, 891 bp, Photorhabdus luminescens
atgactctttcctctgccggtttggcatttcgtcgggctatagacgctgagtccccgttacaggttgtcggtaccattaatgcgaatcatgcgttgctggcaaaacgggcgggctataaagctatctatctttctggtggcggtgtatcggcgggttcattgggtatgcctgatctgggaatttcaacgctggatgatgtgttaacagatattcatcgtattacggacgtatgcgatttgccattgttggtggatgcggatatcggttttggttcttctgcctttaatgtggctcgcactgtgcgttccatgattaaagcgggagcggcggggctgcatattgaagatcaggttggtgcgaagcgctgcggtcatcgtccgaataaagagattgtatccaaagaggaaatggttgatcgcatcaaggccgctgtcgatgcccgtactgataagcattttatcattatggctcgtactgatgctttggctgttgaaggatttgcagcggcccttgatcgggcaaaagcctatatcgaagctggggcagacatgctgtttcctgaggcgatcaccgaattacatatgtataaagcatttgcgtcaacaaccggggttcctgtattagccaatataactgaatttggggcgactccacttttcacaactgaagagttgaaaagtgcggatgtctctattgcgctttacccactttctgctttccgtgcgatgaataaggccgccgagcaggtttacatcacacttcgccgcgaagggacacagaagagtgtgatcagcatgatgcagactcgcaacgagttatacgaaagcatcaactactacgattttgaacaaaaactggatctgcttttctcccagaaaaaatctcaatga

SEQ ID NO: 10263 - DNA, 1167 bp, Photorhabdus luminescens
atgagcgaacagaacacgatgactgagttaaccactttcaagcctaaaaaatctgtagccctttctggcgtcagtgcgggtaacacggcactttgtaccgttggaaaaaccggtaatgatctccactaccgtggttacgatattcttgatcttgcaacccagtgtgaattcgaagaagttgcatacctattggtccacgaaaaattgccttctcgtgctgaattggctgcctataaagcgaaattaaccgcactgcgaggtctgccgggtagcgtaaaggcagcactggaaacattacccgccgccgcccatcctatggatgttatgcgtactggagtctccgttctgggttgtacattgcctgagaaagacgatcacaacctcgcgggagcgcgtgatattgctgacagattactagcctctctcagctccatattgctctattggtatcactatagccacaatgggcggcgcattgaggtggaaactgatgatgtgtcgataggcgggcattttctgcacctcctgcatggtaaaaaaacctgtgaatcgtgggaaaaggccatgcatacctccctaatcctttatgcggaacacgaatttaatgcctcgacatttaccagtcgggttattgcaggaacgggtacggatatctactccgccatcatcggggcgattggtgcactgagagggccaaaacacggtggagcaaacgaagtctcttttgaaattcaacagcgctatgaaaatcctgatgaagcagagcgtgatattctggcgcgtttggcgagaaaagaggtcattattggctttggtcatccggtttacactatttctgatccccgtcacaaagtgattaaagatgtggccctgcaactttctaaagaggcaggaaccaccaaaatgtttaatattgcggatcgactagaagcggtgatgtgggccaacaaaaaaatgttcccgaatcttgattggttctcagcggtttcctatcacatgatgggcgtgccaacggcgatgtttacaccgttgtttgtgattgcccgcacagcggggtgggctgctcacatcattgaacagcgtattgataacaaaattattcgcccttcagccgactataccgggccagaaaatcgagtatttacgccaataggtaaacgtgggtaa

SEQ ID NO: 10264 - DNA, 1452 bp, Photorhabdus luminescens
atgtctacctctgttgcaagcaatcatcctgaatatgatcaggttattgcggatattgtggattatgttatggaatacgccatcacatcatccgtcgcctatgaaacggcttattactgttttctggatacgttgggttgtgggttagaggcactggaatacccggcctgcaagaaattactagggccgattgtgccggggacagtggtccctaatggcgtgcgggtgccgggaacccagtttcaactcgatccggtacaggcggcatttaacattggtacgatgatccgctggctagattttaatgacacatggcttgccgctgaatgggggcatccatccgataacctcggtggcatcttagcagtggctgactggctatcaagaaatgccgttgctggtgggaaaaagccgcttacgatcaaagatgttttgacggggatggttaaagcgcatgaaattcagggatgtcttgcactggagaatgcattcaataaagtcggtttagatcatgtcgtgctggtaaaagtggcttcgaccgctgttgttgctgaaatgttgggattgaatcgggaagagatcttgagcgcggtatcgctagcttgggttgatggtcaatcattgcgaacttaccgtcatgctcccaatactggctcacgtaaatcttgggctgccggtgatgcaacatcccgcgcggttcgcttggctttgatggcgcaaaagggtgaaatgggatatccctcggtattaactgcaaaaacgtggggattctatgatgtcctgttcaatggtcagccttttaaattccagcgtgcctatggcgcttatgtgatggaaaacgtgctgttcaagatcgctttcccggcagaatttcatgcgcaaactgcggtggaagcggcgatcagtctgcatcaacaattgaaagacgccggtaagactatcaatgacattacaaaaatcactattcgtacccatgaagcttgtatacggattatcgataaacaaagcccgttaaataatcctgcggaccgagaccactgtattcagtacatggtggcgattcctttaatctttggtcgtcttactgcggcggattatgaagatagcgttgcggcagatcctcgcattgatgcactgcgggaaaagatagtatgtattgaagatctggattttacccgtgattatcacgatccggaaaaacgttctattgctaacgcattaactgttacgtttacagatggcagccagctcgatgaagtcaaagttgaattccccatcggccatgctcgtcgccgtaaggaaggcattccattattgctgaaaaaatttagaaccaacctggcacgtcagttccctgaaacgcaacagaggagaatcctgtctgtttcccttgactgctcgttgttagaaagcatgccggtaaacgaatacctcgacttatacgttatctga

SEQ ID NO: 10265 - DNA, 1887 bp, Photorhabdus luminescens
atgtcattcaacgctttttatcagcagtccattgatgatcccaacgctttctgggctgagcaggcgcaacgtattttctggcaacatccttttgagcaagtgctggattatagcaatcctccttttgctcgttggttttgcgggggaaaaaccaacctatgctacaacgcgttggatcgctggctggaaagccagcctgatgctaaggcgctcatcactatctcaacagaaaccaatagtgagaaagtatttactttcaaagaattacatcaggaagtgaatcgagcggctgccatgatgctctctctgggcgttaaaaaaggcgacagagttttggtttatatgccgatgattgccgaagcattgtttgttttgctcgcttgtgcccgtattggtgccgttcactctgttgtctttggtggttttgcttctcagagccttgccacacggttggataatgctgaaccggtgttggtggtatctgctgatgggggagcgcgtggtggaaaaattattccttacaagccattgttagatgaagccatcgaactggcgaaccacaaaccccgccatgtattgatggttaatcgtggattggcagaaatggtttgggtaccggggagagatatcgatttcgcgacattgcggcagaagtactttgatgctgacattcccgtaacctggcttgaatcaaatgaaacctcctgtgtgctctatacttccggtacgacgggcacgccaaagggcgtgcagcgtgatgttggcggttatgctgtcgcattggcaacatctatggatatcatttttggtggtaaagcgggtgaggtattttttagcacctcagatattggctggatcgtcgggcattcttatattgcctatgctcctttaattgcaggaatggcgacgattatgtatgaggggctaccgatacggccagatgcgggtatttggtggaaaatagtggagaaatatcaagtaacgcggatgttttcagcgcctacagctattcgtgtactgaaaaaatatccaattgaatgtattggtaaatacgatatttcatcacttaagacattgtatttggcgggagaaccgcttgatgaacataccgcccgctggattgctgaggctatcaacgtccctgtcattgataattattggcagactgagaccggttggccaattatggctatcgcccgtacgctggatgaccggccgagtcgatttggcagtaccggcttcccgatgtatggctttcatgtcaagctcatcaatgaactgactggagaggcgtgtggtgataacgaaaaaggtatgctcgtgattgaaggacctttgccaccgggttgtattcaaactatctatggtgatgatacccgttttatcaatacctattggcgacactttgagcatgctgtttattccacattcgattggggtatccgtgatagtgacggctattattttattttggggcgttcggatgatgtgattaatgtggccgggcatcgtctgggaacgcgggagatagaagagtgtattgccagccatgaagatgttgccgaagtggctgtgattggtattaaggatgccatcaaggggcaagtcgcggttgcttttgctgtcctcaaggatgggaaggagatccagaatgccgagcattttgctgctttggaaaaggttttgatggggttggtcaataaacagattggtagtgtgggccgcccggcacggatttattttgtctctcagcttcccaagacgcgttcaggaaaaatgctacgtcgaaccatgcaggcaatatgtgaagggcgtgaacctggcgatctttccttgattgaaaatcctgcctcattagacgtcattcgagaagctgttttttgctaa

SEQ ID NO: 10266 - DNA, 1311 bp, Photorhabdus luminescens
atggaaatagatgaaatatttaataattatgagtctaaagctcgctcatattgccgtagatttcccgtaatatttagaaatggtataggttctaccttaatcgatatagatggtaaaagttacattgattttttatgtggcgctggtgcgttgaactatggacataataatacaatcataaaacaacagattttcaagtatattcaagatgatggtattattatggggcttgatttgtactcggaagcaaagatggagtttatatcgacatttgttgataagattttgaaaccgagacagcttgaatatcgtttacaatttaccagtcctacgggcacgagtgtcattgaatctgcggtaaaattagcaagaaagtatacaaaaagagaaaatattgtttgttttaccaacgcctttcacggtatgaccggagtgtcgctgagtttaaccggtagtcaacatcaccgccaacctgggttatattctcaaattacgcgcttaccatttgatggctatatcgacggagaatttgattatatagggtattttagaaagctacttactgattccagttcaggggttgatcttcccgctgcggtaattcttgagactgtacaaggagaaggcggattaaatgttgcttctgttgaatggttgagagcgttgagaaaacttacccaagaattcaacattctattaatcgttgatgatattcaatctggctgtggtcgtaccgggacattctttagttttgagcgtgcaagtattaaacctgacttagtttgtctttctaaatctattggcggtattgggctacctatgtctttattgcttatttctcccgatatcgatgtgtggaaaccggcggaagacaacggcacatttcgaggtaataacttagcatttgttgcttcaaaagcgatgttaaatgaatattggggcgatagctcttttcagaagataattgagcataaggctgaattaattcgagcgtacttggactctttggctaaagagtaccatgaatttgtactgcgagttaaggggattggattcatgcaaggtatagaaatggttgattcctcattaacacaatatttggtgaagcattgctttgaaaatggtttgattgtggagttgtgtggccccaatgatgaagtgttgaaattgatgcctgccttgactattgatgaagacacacttgtaaaaggattgaggattatagaacaggctctcgccagtttaaaatcgagaaatagtaataactgcgaaagtgaatttcaaagggtatcggctagcagcaattattag

SEQ ID NO: 10267 - DNA, 858 bp, Photorhabdus luminescens
atgagccgtgtagtagaacttactaagtttaatcagcttgaatttcatcacacacttgctcggggatacgcaattgtttaccgaggtttattgcaagactggccagcgataaggcaatggaattctgaatactttcaagataagtttcctcaaattgatgttgtgatcaaattttttgatgcaaatggtgtgcgttttgagcaagccaagatgtatcgttatttagaaattctgcatgcatataaaaaaggagagatgggtaataatattccctattgtcatgacatccctatctttttacaagctcagcagttacttaatgacgttagtgattttccgctaactattttgccaaagctttatcgaaatgaatggtggaaatttgttcaattttttatgtctccagccggcgctataacgccactgcattttgatactttaagaacaaacaatctattttttcagataaaaggaagtaaaagattctcttttattccttgggaagaaagagcggcctgttctcgtcgagggtggcgctggtttgagtataatccagagattcaggatgttggtgagatagctaacataaacaaatccacgattgaggtgcatcaaggcgatatattaatcatgccggcgggtatgcttcatcatgtaagaacgttgactgatagcatttcttttaatatcgattttcatactcgatcttcagcccttgtaagttttaagagcattaaagaaaaaatgccgcgtgaaaatttgtattacaattggctaagtttatgtgggcttttgggattaatgaagcgcgaaagttttttcgagaagtaccgcccgtatcttaattatatttcttaa

SEQ ID NO: 10268 - DNA, 456 bp, Photorhabdus luminescens
atgaaagtatcgttgattgatgtcgataaagacaactatgaggatgtgatgtctcttgaagtcgaacctggacaagaaggtttcgtcgcgccaaattcagagtcaattgtcgaatcacattttaatgaatattgtaggccaagagtgatctgttttggcgaggaaatagttggttttgcaatgtatgagcgttgcgttaatgaaggaaaacccaacgaatataatctgtatcgaatgatgattgataaatcttaccaaaacagaggtattggaagttcggcgatgcagttattactggatgaaatgaaacagcagcctgattgttacaggattactgtctgttatgacgaaactagtgaacgccataaatcattttatcaacgttttggttttgtagaagtcggttattatgaagagtatgaggaaatgctggctgaaattattgtcaggggatga

SEQ ID NO: 10269 - DNA, 9858 bp, Photorhabdus luminescens
atgcttctagataaagttgaaccgcttgttattccactaaatcaacagcaaaaggaaatttatcttgatcatataaatagagaggataccgcagcgttcaatataggtggttatgttgagattaagcaatctattaatataaagaatctcgaatgcgccataaaacacactatccaagaacatgctgtgcttcgatgttcaatagtagataagtactcaatgccgcatcatattgattcggatgcgttaaaagatacagttgagtttgctcatattgttcaagaccatcactttgaactgtctcatttagatctttcgggtgaagaagaggcggaatctaaagccttggctattgttcaacggatattctctgagccatttagattagcacaggatgtgctttatcgagtcggcttaattcaattggcgacaaatcgtttctggttatactttatttctcaccacatcatcattgatggtgtcggttatgctaactggtttcgacgtattttcgacgcctaccagcaattgagtttgggaaatgcgcctaaagaaaacacgggagtgcggtttcttgatcttgctgcgcaaccgttaccggagaattatagtcagcaattcgcaaaggcagctaaatactggaaagagttgctccatcatttgcctgatgtgcctttccaatgtcggaaagaaggccctggaactgccgactcaaggaaaaatagcaggcttgtacactttatcaaacctgatagatataaatcatttttaaccaaggcgagtcaatgcaatttacccatatcgccactttttattacagctattgcttctttagtcaaccgtatcaaccaaagtgatggggttcttatcgggacgcctttacataatcgtactacatcagctcaacgcaatatggttggttcgtttatatcgatgctaccggtaatgtgcgtacaaaatgagcagatgtcggtggctgaatcagtggcaatgacagcacgtactataaaaagtggctatcgttatcgctcttatccttcgagtgccttatataaagatttgtctttacgtgctcaaggtcgtgaacgtctttttgatattgtttttaactatcaacagattgattttgatttcagtgctagtggcttggatacggagactcattaccttagtcatgggcgtgaagatattccgctcaccgttatattatgtgattacggtgataagcaaagcactcagctccaactcgattatcgtcatgattatttctcgtcacatcaggctgaacatttattgcaaagcattatgactttggttgaacaaatggttgcacagcctgaagcgttattaacttcacttgatctggtgggtaaagacgttgaacaggcgttatggaatctaagtcaatctgttgtgacaggagaaaaacctgtctgtccgaccatcacattagtgcatgagcaaattgagcaatatgcaaaacggcatcctgatgccattgctatcgtggatggcgaacgacacatgtcttacgccacattgagcaataaagccaatcagttagctaactatttaattgagcagggggttcggcctgatagccgtgttgcgatttgcttgccgcgttcgagcgagatgatcgtggcgatgttggcgacgctgaaagccggagctgcttatgtaccgatggaccctgattatcccgatggtcgtttgcagtttatgctgaccgatgccaaacctgttgtttgcatcacagtgtcttccattgcacatcgattcgcagcatgcgagattacaacactattgcttgatgatgctcagcttaatgaacatttggctctgcgttctgtggcaaacatatctgccagcaatattggcttacagttggaacatctggcttatgtgatttatacctccggcacaacggggcagcccaaaggtgtgatggttgaacataagcagttgagtcattttgttgcccatatttcaaaggcttatagactgaccgaacatgataagtttttgcaattttcttcggtcagcttcgatatttctgtggaagaatgtttcggttccttatgtaacggcggcactctggtgttacgagctgatgatattcattacgattttgatgcattttgggcattttgccgacaccatgaaatttcggtgactagtttacctaccgctttttggcatcaactggtgaattacagtcgtcaacctattgagtcttcactacgtttagtgatcttaggtggcgaaatggttaaatccgttagtgctcgtgaatggttcgaacgtggcccggctatcgaactgatcaacacatatggtccgaccgaaacaacagtaaccgcgtctgcttactgcatgacatctttggctgatgtaacgacgatgattcccatcggtaaagccaattatggtacccaactttatatattagatacgaatttaaaaagtgttcccgcagggtttcaaggggagctatatattggtggaacaggtgtaacgcgtggttatcttaatcgtgagcaagatagcgcgaagtattttgtggctaatccttttggcccgggacgactttatcgcactggagatattgtacgtcagttatccaatggtaatttagagtttattgggcgtaatgataaccaagtaaaaataaacggttttcgtgttgagccagaagaaatcagcaatcaattaatggattatcccggcattcatgaagcagttgtctatccccgacaacttggctctgatgatcgactacaattaattgcttatattgttgctgaaggaaccatcaatattaatgctattcatctggcgatgaagagcaaactggctgattacatgttgcctgttgccgttgtgcagttagagaaattaccactgacacaaaacggcaagttagatttcaagcaattaccactaccacaaaaacaagattatagtcagcaggaatttgttgcccctgaaggcgaagccgaacgggtattagcgcaactatggcagtcgctattagccttgaataaagttagccgccacgacaatttttttgctctgggtggtcactctttattaattatgtcattgcgcgcagagctggctcagcgtggttatgagctgcctatgcgcgcgatttaccgaactaatacgctggcagaactggcattacatttatcttgtgtccgtaaggatgaggatacgttaacttaccgagaggtcgctgttaacaagcttgcagagcatgttgaacacatcacgcctgatatgttggatatggtgactttgagtgaaaaagagatcgcagttatttgccagcaagttgagggtggtgccggtaacatacaagatatttatccattatcacctttgcaggaaggcattttctttcaccatcgaatgaatggagagcacgatccttatattattccgattctgataaagttttctgatgagcaaaagttgacagcttttctccatgcgcttgataagatcgtagagcgtcatgatgttttccgtacttctattcattggcaggatttaaccacatcggttcaagtggtccatcgaacagcttctattccccttcattggcaagcggttattccaggtctttcggcgttggaaactgtgcaacaggcggcctttgaacgccattatatgaagctggatcgcgctcctatgatgcaggcgattgtggcgaaagggacagagagtggtgaatgttttctactattaaagcaacatcacttactaagtgatcatatttctgtcttattgcaaattgaagaaatgcaagcgttgcttgaagatccaaatgtggtattgccaacaccggttcaataccgtgagtttgttgctcattcattaaggattaaccaatctgacaaaggtgttgattactttaaagctaaattgtctgatgttgtggaaactacggccccttttggcttgttgaatgtttaccatgacgggttggaagtaaactctgccggagaattagttggcccgcatttagcgcaacagattattggtctggcaactcagcaacgtattagtactgcgaatatttttcatttggcttgggcattggttgttgctaaatgcagtggtaaagacgatgttgtttttggttccatgatgtcagggcgaatgcaggctattcatggaagtgatcgtattttgggtatgttgattaatttgctgcctatacgcataaatctgacaaatctgtcggtaagcgaagcattaacccagattagtgatgaactcattgaattggccgactacgaacattttccgctttccgaggcattacgttatagctccttaccaggcggtacacctttgtttaccagcctgttgaatttacgccataaaaataaattggcgattgccaaccaaagtcatcattttgaaatcatagaggctagagaatataccaactatccgttagagatgggagttgatcagcttgataatgatttcatgatgcaagttcatgttgagccgcaagtcggagcggctaatgttctgacatatatgagaacagcattggtggctattattaatgcgtttaaccaggctccgcaaacacccttgctgacattatccataacgcctattagcgaacagcagcggattattaacgaatttaacagccctgtcgctgcttatgataaaaccgtgacgattcatcaacgttttgaacatcaggtagtaaaaacacctgcggccattgctgctgtatgtaatacaaattacatcacttatgctgaacttaatcagcgcgctaatcagctcgctcactacttgatagaacaaggtgtggcacgaaatcatattgttgccatctatgccgaacgttccattgaatttgtcgttgccatacttggcattatgaaagccggtgctgcttatgttcctttggaccccaccaatccacttgaacgtttgtcatatatgttggctgactctggggttaatgtggttttaactcaacaccatttaaatggattaaccttcaatggtcagaagtattttctgttggatacggactggtcctcattaggggattatccaaacactaacccagaggttgagtgttatcctaatgaccttgcctatatgatttatacttccggctctactggcaaacctaaaggtgctttggtgcaccatgccggggcgttgaatcatattgatgctgaatttgatgttcttggttttatggatagtgataatcagctattaccacgtaactttttacaaagtgcagcctcttcttccgatgtctctgtatggcaatttctagcacctttgatgagtggtgggaaaacagtcattctgcctaatgctatggatttgccagaatatgtgcgtgtattgcaaaacgaacagattcatctgattcaaaccgcaccttcggtattgaaaatattattggaacactttcttaataaaggcggaatatcaataccattaccagatctgaaatggttaatgattatagctgaaccttgcccggtgcctttggttaaccgctggttgcaaaattatcctcaaattccggtgatgaatggctacgggcccagtgaggcatctgatgatattacctattttattattgatgagccgttaacagagcaggttaaaaatattcctgtaggtaagccattgccgaatttaaccatgtatgttttggatcaacgtatgcagattctgcctaccaatgttgttggtgaattgtgcgtatctggtatcggtgtaggaaaaggttattggaataatcctgaaaaaacggcagaaagttttaaagataatccttttcacacaatgggagggcatggaaccagactttatcgtactggggatttaggctactggcgggcggatgggaatctggaactcgtcgggcgtattgataatcaagtaaaaattcggggtttccgtgttgagctgggagaagtcgaatcggctttggtgaaattacctcaggttatggaagcggcggttctcgtccataaagacagagtgggggaaaattgtctggtagcttatttggtattagctgccaatgtcgttcagatacagcaatccattaacgatatcaaacaggggttaagttatcatttacccgattatatgatccccggctactatgaaattttaaccaggatgccattgaatgctgcggataaaattaatcgccatgaattgcctaagccttgtttcgttaatcatcattctaagtggattgggccggctaacgcgcttgaacaatcgttagctgaaatctggcaatcagtgctcaatgttgaccaaatcgatcgtaacgacaactttttccatctcggaggccactctttgttggttatccgggttatttctaaaatacgcgcagaacttgggcatgatattgctgttaaagcgattttcgatcatccaacattgatcgaacttgcagcaatgcttaaacaacagacgactaaaactgttgttgattcaattcagaaacagcccaggaccgatgagttactgcctttgtcatttgctcaagaacgtttgtggatccttagccaaattgatcaaagtagtgcggaatacaatatgcccattgcatttgctgttaagggcaaatttgacgttagtgcagccgaacgggcattgaatcagatcatcgaacgccatgaaatattacgtacggtttacattaagaaagagggcaacccattccagaaagttttatcaggcaggaaactgacactcaattatatcgacttaatctatatgtccaaagagcaacaggatcggcatgttgctgaattaatgatagaagatgtcaaccggatctttgacttaagtagcgatttaatgatccgcgctacttttattcagtgtcaagtcaataacggagtattactgtttaatgctcatcatattgcgtctgacggctggtctgaggatattcttatccgtgagtttgttgcccgttatgaggctatacgcaacgggaaccatttcgaaatagaagaacttgatattcaatatgctgattttgcaatttggcagcgtaacagattgcaaggtgaatatttagagtcccaaatctgctattggaaacagcaattgagtgaactcccgccggtacatggtgtaccgctggacaagccaagacctaaggtcaggcagtatcaaggggccgtggtaacaagcatattgccggaagagactacgcgtgcgcttgttagtttggctagacggcaccaaatgacgccgttcatgctatttcacgccgcattggcattagtgctgtctcgtcatagtagtagccatgatattgtgataggtacaccggtagcgaaccgtttgcaggcagagctggagacgcttattggcttctttgtcaataccttgatactacgggtagataccagacatagtgcattgagtgattatcttacccacgtcaagcaagtgcatctggatgctcaggataatcaggatgtgccatttgagcagttggttgagcggttgttggtaaccagaagcacggcgtatacgccattgttccaaatcatgttgacgatgaatacggactatggtctgaatcatgacattagtacaacagcttttaacctgccagaagtagaactgagtgcaatagcaccaaaccatatcctggctcagtttgatctcgatcttgagctgagtatcagtgatcaagggttgcttatgcactggacttatgacaccagtttatttagccatgaacatattgaacagctaaatgaccatttgtcgcgtttactgagtggactggttaatgtggcggagaatgtggcggagacggatgattttacctctatctcacttgctaatctgcccatattgtcagacacagaaaccgaatacttgctgcataccctcaatgatactcatgcaaattatcctaagaacaagtgtatccacgaattgtttgaacagcaggccgaggaaaaccccaataacattgcgttagaatttggcgacagccagttgacctaccagcagctcaatgaaaaagccaatcagttggcgtattacttgctggagcaccatgctatccagcctgatacacccgtggggctatgtgtggaacgttctttggagatggttataggtatgctggcgattcttaaggctggtggtgcttatgtgccgttgtctccagaatgtcttgaagaacgtctggtctgcattttggaggatacacagcttaatgtggttctactccagtcatgtttgcagcaagtactgccagatttcagcggtcaacgggtcatattggataatctcagcaatatagacggtcaaaccagcacggtatacagccactatcctattgccaatccgaatagacattcactgggattgactgccaaccatttggcttatgtgatttacaccgcgggatcgaagggtagacctaaaggggtaatgattgagcatggtaatacagttgccatgctcagttgggctcaatcacaatacacaaaagaagacatagcctgtgttctcgcgtcgacctcccttaactttgatttatcagtatttgaactatttttacctttagtttcgggtacacgtgtatgtattgttgagaacataatcgctttatatgaaggaattgaccatgaagtcactttaataaatacagtaccttcaacaatgagctatctggttgatcaaaatgcgataccgagtagcacccgggtaattaatttggtgggtgaagctttatctgcaaatctggtcaatgaaatatatgaaaaaaataaagatgtagtggtctataacttatatggactaccagaggatacgacttattctacttgggcgaagttggattcctccataaatgctacaccgactattggtcgaataattaataatagccaggcttatattctggacaaagagcatcaactggtaccttatggttcaattggggagctttatgtcggcggtgctagtctagctcgcggttatttcaatcgcatagaattgacaaaggaacgctttgttacaaacccatttcatgatcccaacacccccaacagtagtgagcggttattcagaaccggcgatttagtgcgttatctgccagacggcaatctggagtttattggccgtattgatgttcaggtgaaaattcgtggtttcaggatagaactgggtgaaattgagtatcaactcaaccgacaaacaggggtgagttcgtctctggtattggctgaggcaacatcaacgggtgataagcaattagttgcctatgtcaaaccggtgttgggaaaattaaaattgatgtctgaaatgaatgatgcggaaaagcagcgggctcaaacccaatttattcaggacatcaaatccacactggctaaatctttgccggactacatgatgccgtcagtcattgttatggctgaagaatggtctctgccctccaatggtaagatcgatcgcaaggtattgtctgaacttaatattgaacatggtaagaatgatgattttgttgaaccgattggtgaaacagaaaccttattagctgaaatttggcaggaagtactgaacattagccaggtatcgcgtaacgataactttttcgcaataggcggtcattcattattggcaatcaaattaatctctgaaatcaatagcgtattcgtcattgaactcagtgttatgcaggtttttcatacacccagcctgtgtgagcttgcagaattaatctgcaaccagcaattacaagaaaaaatcaaaagagagttagtcacagcaggagaagaggggtggttatga

SEQ ID NO: 10270 - DNA, 9813 bp, Photorhabdus luminescens
atggatatgctgaaattagtccaagatgcttacgagcagggagtattgctgtttagtaaagatggtaagttagggttcaaacttaagggcactcacttcccagatgaactgaaagccaagattcaggcacataaagcggcactgattacgtttctcgatgaaggtaaggtggatgcttctggcaataaaatcgcgattaaaccagcgcctagaacccaaccattacctttaagttcctctcagcagcgtatttggtttatcgaccagtttggtggtgacagcactgcctacaacatggtgtcagcttatacggtaagcggcaaatttgaactggcggcagcgaatctggctctgcaaaccattatcgatcgacacgaagtgctgcgtacagtttacctcagcgatgaaaatggaacccggcaggttatcaaaccggagtggtcgttcgagatagtccaatcagatatcagtgatatagagcaagcccagcaggaagcgtggattgagcaggccattcaggatgaaatggcctgccagtttgatttgtcaaaagatatgatggtgcgttgccgttacatcagcatctcggcggagcagggggtgctgttatttaacatgcatcatatcgcctcggatggttggtcgataggggtattggttaaggaatttgtaagcttgtatcaggcttatcgtcaggggcaggctaacccattatcggctttggagattcagtatgccgattatgcggtctggcagagtagcccagagagacaggctcagctagcggcagggttagcctattggcagcaacagttgtcggatttacccccggtacacggcttgcctctggattacgggcgaccagctaaccaaaccagtcatggccgcagttatgaatttagtctgaacaatgaggttagtaagaggttgcagcaactggcactgacgcagggctgtactctttttatggtgttacatgcggcgtttacggtgttactcagtcgtcatagcgggcaacgagatattgtggtgggaaccccggtagctaaccgtttgcagatatcattaacgccgttgataggctgtttcatgaatacgctggtgttgcgcagcgagtgtgggctggagcaatcgtttattgattacttgagctcggttcgggagataaatctggctgcccagcggcatcaaaatgtcccgtttgagttgttggtggagcggttgcagccggaacgcagcacccgttattcaccgttattccaaatcatgttttctatgaatacgaatgacagcgtggagttgcaactggaagggataagtttgcggccacggccggaacagacccgcaatgcgatgtatgaattgacgttagaggcccagcagacagaggaaggtctgatttttagtttcgagtacaacacggatttgtttgcagaggagacaataaagcggctggcggcgcgttttacaaccttgctgatgggcatagtggcctctccgtctgaaaagcttggcgatttggccctgttgccgccggaagagcaggattacctgttgcaccatttgaaccagacagcggtagagtatgaccgtagccgatgtattcatgagtggatagaggcgtttgctgaacaaacgccggatgctattgcgttggtctttggtgaccaaaagctgacttatgcgcaacttaatgccagagccaatcagttagcacatcaattaagagctcagggagtttcaacgagtgggcgagttgctgtgttgttgcaaagaagcatcgacatgatcaccgcactattggccgtgatgaaagcaggagctgcgtatgtaccggttgatcccagctttcctgtcgacagagtgcagtacatgctgaacgatgcagagccacaatgtattataagcaaccgcgaatatgcatcacgatcagttggttttgcggaattaacctgcttactggatcacattgaccttagccaatcacccaccacaaatattcctaaacagtcgatcggtttagctgcatctgctctggcctacgtgatttacacttcgggttctacgggcaagcccaaaggtgttatggtcagccactcggcggttaataacttcttgatctcaatgcaagataacttgcagtgtgtggcacaggacaatattttagccatcacgacgatttcctttgatattgcagtgttagagctctatctgccttggctgtctggtgctacctgcgtcgtagcggcgcagcaggacgtgactgatcctgccaggctagttgcactactcgaacaacatagtatttcgttgttacaagccacgccaacgacctggaatatgttgcttgaatccggctggcaggggcgctcgtcgttaaaaatgatcagtggtggcgaggcgttgccattagcgacagcaacggcattattgagcaaaggcagcgcgctctggaatatgtacggaccgacggaaaccacggtttggtcaaccattgcgaaactggacgtacaactgcttgagcagcaacttgttactattgggttaccgttaaacaacaccacaatttatttacttgatgaacaattaaaaccggtgccttttggggcagtgggagagttatacatcggcggtgatgggcttgctgaaggctattttaaacgagaagatctgactactgagcgattgattaacctgacattttctgacggtttaaccgctaaggtttataaaacgggcgatcttgcccgttacactaccgagggttcactggtctatttgggcagaaatgattaccaagtgaaattacgaggccaccgaattgaacttggtgaaattgaacaggttattaacctgtttccacaaataacccgttctgtggtggttgcgctaaacgatcagcaaacacaacagtatctagcgggttatgtggtcgccgagcagcaaattgatattgatgcgctacgtcaacaccttgaacagaagttaccagcctatatgttgcctcgggcaattattcagctcgaaacattgccacttacactaaataacaagattgatcgcaaagcgcttccaacaccgcaagacagcgatattgctgttaaagccagtacgccacctatcggtgagacagaagcagcactggcagctatttggtgcgaaatgctagatattgagcgaataggccgggatgacaacttttttatggttggtggccactcattaattgcgactaaggtaatcacaaagattaatgagcagtttgaatgccgtttacaggtaagagatatctttgaagctgcaacagtagctttacttgcagagagagtgccttatgcggcatgggataagcgttatcagacaattcctattattgaacgcaagaccaatttattaccgcaatcttatgctcaacaacggatctggtttatcgagcagtttggcggtgatagcaccgcctacaacatggtgtcagcctatacggtaagcggtaaatttgaactggcggcagcgaatctggccctgcaaaccatcatagatagacatgaagtgctgcgtactgtttaccacagtgatgaaaatggaacctggcaggttatcaagccggagtggtcatttgagatagctcagtctgatatcagtgacataggcaaagccgggcaagaagcgtggattgaacaggctattcagcatgaaatgacctaccgatttgatttggcacaggatgtgatggtgcgttgtcactacatcagcacttcgatggagcaaggtgtgctgttatttaacatgcatcatatcgcctctgatggttggtcaatgggggtactggttaaagaatttgtgagtttgtaccaggcttatcgtcaaggtcggactaacccgttaccggcgctggagattcagtatgccgattatgcagtttggcaacacagcgcagcagaagaatctcagttagcagcaggggtagcctattggcagcaacagttatcggatttacccccggtacacgggttgcctctggattacgcgcgaccagccaaccaaaccagtcatggccgcagttatgaatttagtctggacaatgaggttagcaaagggttgcagcaactggcgctgacacaagggtgcactctttttatggtgttgcatgcggcatttacgatactgctcagtcgtcacagcgggcaacgagatattgtggtgggaaccccgatagctaaccgtttgcagacatcattaacgccgttgataggctgttttatcaatacgctggtattgcgcagcgagtgtgagctggagcaatcgtttatcgattatctgagatcggtccgggaggtaaaccttgctgcccagcggcatcaaaatgtcccgtttgagttattagtggagcggttgcaaccggaacgtagcacccgttattcaccgttgttccaaatcatgttttctatgaatacgaatgacagtgtggagctgcaattagaaggggtaagtttgtggccgaggccagaacagacccgcaatgcgatgtatgaattgacactggatgccagccaaacagaggacggcctgacttttaatttcgagtacaacacggatttgtttgcagaggagacgataaagcggctggtggtacgttttaccaccttgttgatgagcatagtggctgctccgtccgaaaagcttggcaatttggatctattgccgccggaagagcgggattacctgctgcacagcttgaaccagacagcggtagaatatgaccgtagccaatgtatccatgagcggatagaagcgtttgctgaacaaacgccggatgccattgcattggtctttggtgaccagcagttgacttatgcgcaacttaatgccaaagccaatcagttggcacattatttagttgctcagggcgccaaaccggattcaatgattgcgatatgtattgaacgcagtattgacatggttgtgtcggtacttgccattttgaaatcaggtagtgcttatttgcctcttgatcctgcctatccgcaagaaaggcttgcttatattattgatgatgcacagcctttgatggtgataaccaatagccataaccagaagttattgcctgaaaatagtctatttagcattgatgtgacgacaacctcgtttgccgagctctcaaccgataatattcccgccgttgaattgggtttatgttctacccacttggcctatgttctctatacctcgggttctacaggcatgccgaaaggtgtgatgattgaacatcaggcattggtgaatctggtagtggggcttgcagatgcctatctttattcaaaacaggatcgggtattgcaatttgccgccctcagttttgatatgtctatcgaagagatatttggtgctcttggtaatggcagtactttagtcttacgtggcgaagattggttgatggatattgccactttctggcaaaggtgccgggaataccagatcagtgcggtaaatttgccaaccacgttctggcacgaagtggtcagtgaagagacggttttagtacctgagcatattcgccaaatcagtgtcggaggcgagcagattaagccagataaagtggttgcatggtaccagcgaccagggcatttaccccgtttagtcaatgcctatgggccaaccgaatacacggtcaatacttgtattgcctacgatcttcggggagacaccctcagtatcgggcacccaatccaaaatacggccatcttcttgttggacaaaaaccagcagcttgtgccttttggtgctgtcggggaaatttgtgtcgcgggtgacggcgttgcgcggggctatatcaacaaagagcaattaacccgtgagcgatttattgataatccttttgtaagccgctatccaaagctctaccgaaccggcgatttggggcgttactcactggccggggatattcaatattacgggcgtgatgaccatcaggttaagatccgtggattccgcattgagttaggggagatagaaacaaggttgcgtagcttgcctacaattcgtgatgcggttgtcattgctcgggaagatgaaccggctcacaagtatctggcggcctatatcacccttgatggtcagcagaaagttgctgagattcgacacctattaagtcagcaattaccgagctatatggtccccgccgcttttgtggtgctagaggagataccgcttaccgccaaccgtaaagtggatcgtaaagcgctccctaaaccagattttgttattcagggggaaattgaatatatcgcgccggccactgaacaggagacattgctagctgaaatttggcgaacactgtttggattggcgcaagtcagtgctgttgccaacttctttgagttgggtggacactcattgttgagcatgaagatgctatcccatcttaaaaaacagggttatcgcttggatattcgggccttgtttgagtacccgaaattacgggatatggcgaaacaactacaggcaatcgaacaggaatcactgaaactaacagcccatgaagccttggaaagtagggtttccctgtcggaaactgagcgggccttgatcgtatctcagtcgccgggaggtgagcaaaatattgctggcatttatcctttggcaccattacaggaagggatcttattccatcacatgatgtgtgggcgatctgatctttatgtgacgccgatgctgtattcatttccgtcaaataccgagatggaaagttttattggcgcattggataaaatagtacagaggcatgatgcgctgcgaaccggaattttttggcaaggtattgatgaaccagtgcagattgcctacaaagaggtaccattaccggtagttgatatcgatttgagggatgatgttgatatccagcagcagctagcacagtttatggatccatcacaacaatggatggatgttactcaggcaccgttgatcagagtaacccggtttatcgaccgtcagcaaaagcagttctatgcaatggtgcaggagcatcacctgataagtgatcatgtgtcattggagattattcaagaagagttgctggttatcttggcaggtgatgaaaagtcactgccggaggcgttgagttatcgggattttgtcttaaacgccatcagcaaaaccgataccaaagcggcgcagcagttttttaccgagcaattggccgggattgatgaaatcacggcaccctttggtattaccagtggaatggttgacaataacttattcactgaaatccaaattggcttgcctgcggatttatccgcacagattcgtcggtcctcttctgcatggaggataagcccagcgcttatttttcacatggcatgggcattggttttggcaaaaaccagcggcactaaagatgtcatattcggcactgtattatctggtcgcttgcagggtattgataatgttgagcgagtcgttggtttattcatcaataccttgccactgcgtattgatttgagccagttgagtgttgctcagttaatgcaggaaatgcaacagaaactggttagcttgctgcaattcgagcaagtcccgacggcgattgctgaacagtgtagcaaattggccggttctagccgtttattcgacagtatcttgaattaccgtcattccgaagtgagtggcgagacaagtgagcttaaccaacgttggcaaaaaaccggcattgagttagttgatgtaaaagagcgtaccaattacccgattaccctatccattgacgattttggtgatgattttgctgttgcagcccaaatcgacagccgatttgatgctgaacgcttggtggcgtatctcatcaatgctagcaggcaacttgttgctgctttacaaagtcaggaacaggttgccgcactgtcactcgacatccttgatgctgaggagcgggcgttcctgctgcattcgttaaatcaaacggaatttccgtatgacaactcacaaactctgattgatagattcgaagcccaggttaaggcgactcctgatgagattgcgttgaattttgctggcgagacgatgacgtatcgtgagttaaatcagcgaaccaatcaactcgcgcagtatctcgtgaaccagggagcgaaagtgaatactcccgtcgtgatgttcattgaacgctcctttgagatggtcatcactattatcgctatcttaaaaaccggtgctggttatgtgccactggatacctcattaccgacagaacgcttaaacatcattctgagtgatctgtctgatgaaatcttagtaacgacctgcgccttgaatgacaggattgcggtaaaacgccagaaaatggtgttattggatgacccttgcacagcagagatcttgggcaaacagctaatcagtaatttggctatcgaatcctctctggataacctcggttacgtgctctatacctcaggttcaacgggtaagcctaaggcgattgaaatgccgcagcgggcgctgagcaatttattacaaggtataagccagcttgagccagcgcttacggggccgaaccgttggttacaattctcatcaattggttttgatctcagttttgaagacatattcatgccgctgttatctgggggttcagtacagcttattgataaatcgactcagttggatattcggctgttagcgaagcaaatccagcaggcgcaacttcaagtgctgaacttaccttatgctgtattgcagaatctggctgaatatagcggtgtcaatgggctacagttccccgaattaagggtgattgtgtcgagcgcggaaaggctcaaaatcacggcggccatcagacagtttttcacgacacatcgtcactgtaagttagtgaaccactatggcccggcagaaactcatgtcgtaacgtctaaaacattacagggagaacctgcttcatggccggatttgccgacaattggccgatcattgcccaacgtggccggttatattttggatgagtatttacagcctgttccgatgggtgccatcggcgaactgtatttagcgggggactgtttatcaagaggctattatcagcagccccagcttaccgcagagcgttatcttgattgtgattgggttcttgggaaacgagtgtatcgaaccggggacttagccagctttcatcaaaacggtgaaatcaactactttggccgcaacgaccatctggtcaagatccgtggattcagaattgaactcggtgatatcgaagcccaattgagtaagttcgatggaataaccggaaccgtagtcattgctattgatacagaagccggtgataagcagcttatcgcttattttatcgcggctaacccgttggatttatccgaaattaaaacctatttatcggctagcttacctgattacatgttgccatccgcgtatgtacggatggcggcttttccgctgaataccaatggcaaagtggatcgcagccgacttccacaacctgaagcagataactttgtaaaagccaaatacatcgcgccagtgactgaactggaacgaagtgttgcgaaaatttggcaggggttgttgcaacaagacagggtaagcatggccgacagcttttttgatttaggtggtcattccttattagctatgaagctaatttctcgaattgaacaggcattttccgttggcgtaccgattgcgatcgtgtttgagcgatcaagattagaacagttatgtgattggcttgaaaaagaaatggttattcaacgtaacaagtcaattggggctgtagtggcagaatatgaggtaaccgagtggtga

SEQ ID NO: 10271 - DNA, 3402 bp, Photorhabdus luminescens
atgaacctaaaaggctttattgatagattgtccgagcaggaagttcgtctttttgttgaaaatggggcgctaaaatctcagtctgctccgggtgccatcacacctgaacagggaaaatttattaaacaaaacaaacaagcaattattgattttctctctcatacagaggtggcggggcaacagaagttttcgttattacaacgtcggcaccttaccaaggcaccattatcctttgcccagcgccgtttttggctggtcgaacaggtttctacagttgaacgtcagtataagatttcaactgcattcaatttatatggtcaattttccttggaagccgcgagtcaggcgatagatgccattcttaagcgacatgaaattttacgaacggtttatcaggaatcacagggcacgcccgcacaagtcgtgttgaacgactatgttttccagattgacaaagacacccttgccgatggtgttgaccaacagcaacacatagaggattggctggagaggcagagacagaggaaatttgatttaagtagggatttaccgctaagagtggcctatttggcctctgatctaaaaccagatacctcagataagccgttgaccggcgtattgttttttgatttgcaccatattgctgctgatggctggtcgctggcgatattagttgatgaatttacccttctttatcaacaaattgtgcagggtaaacccgccttactgactgagcttgaattgcaatactcggattatgcttactggcagaatcaagctgaaactcagcaaatgtttgacgagcagttgcaatattggcaacaacagttggctaacctgccattggttcatgaattgccgttagattatgctcgcccgcaaaaattggatatgcgtagcgcaatgcacacgcaaaagataccaatggagacggtgagtaaacttaagcgattagctgtagatgcaaatgccactttattcatgttgttgcataccgcttttgcggtgatgctggctcgctacagtgataacccggatgtggttattgggacacctattacaagtcggccggtacagaaactggagtcgctcattggctgtttcctcaatacgctcgtattgcgtttggattgtacaccgacgctgacattcaatgcgttgttgaacaatgcaaggcaggtgcaccttgatgcacagagcaatcaggccattccattcgaattattggtcgagaaattgctcgctgaacaaagcaccgcgtttactcccttattccaagtgcttttctcaatgcaaaattatgaatctcaaccgttggaacttgctgatgttgaatttaaagagcttatggaacaagggggacaaacgcagtttgatttgaccttaaccgcagcagaagatcaggatgggctgtcgctgatttttgagtttaatcaagggctttttaattcggacaccatcgcccgttttgccgaaaatatgcagttgttgttggcacatattgcggtcaacggtgataggccaattaatcaattggcgattgtcagtgagcaggaacaagctgtgttggacaaatctcatcaatcagcttggcaactgcctgaggtgcaaccttttgtgcatcagcttattcaacagcgggtggctgagtatcctgaacgagtggcaattcgctatcaggagcaaagcctcagttttgctgaacttgatgcaagggctaatcagatcgctcaattattgttgactaaaggtgctgacaacaacccgttggttgctattttgatggagcctggcattgactttgttgtcagcatgctagcgatattgaaagcaggatgtgcttatttgccattagatcccacttattctgtggcacggttaagttttatcttggctgacagccatgttggtttggttatcgtcgataacaagagtatcgataaggtcaatttaccagcggatagcgtttgcactatcttgcttgatgagactgaaattgccgcccagccccgtactgaaccgatgttgacctcaagtgtgacagcggattcccttgcctatgtcatttatacctcgggttcaacgggtaatcctaaaggggtgatgatccagcatggggcgttgagcgcatccactgctgggcggtttaattcatactcgatagtaccggagaaatttttactggtttcctcctttgctttcgattcatcgattccggcgatatattgggggcttggcagcggtgcaacgttgcatttaatggcccctcaagatgcgaaagatgcatcgtatgtggcgaagcttatagacagtcaacaaattagccacgttctttttattcccagtttctacgatgctgttcttgattaccttgtcgggccttcactacgtaaagtgatttgcgccggcgaaaatttgtcggacaacgtaaagacaaaacatttccagtgtcagcctcaggcaacgcttgtcaacgaatatgggccaacggaaaccacggtatggtcttcgttgaaaatctttgaaaaggcgacggagccagtcacgattggtcggcccgctccccatgtgtcacttcatgtgttggcaaaagatcgctcccaatgcccggtcggtgtagtaggagaactgtatgtcggtggtgtcggattagcaaaagggtacttgaaccgcccggaactgacggctgaacgttttattgatcatttggatgctaaaggtaaccgcgaacggctatatcgcaccggtgatttagtgaaagtgttgccatcaggcgaaattgcctacattggccgaaatgatttccaagtgaaattgcgcggttttcggctcgaattgggagaaattgagcactgtatccgcacgcattttgatgtcgcggatgttgtggtttgtgtgagacaggatgacaagcagcggcaatccttggtggcttatttggtggctccgtcgatgctcgacatacgagaacagcgcgataaagtcgagcgtatcttaccggagtttatgtggcccggcttctatgtgttattgccggaaatgccgctgactgagaatggcaaagttaatcgtaaagctctgcctgcgccaagcagggaaaatatcgctaaggagccttttacgtcaccagaaacggcaactgaaaagcagttagctggattgttccatagagagcttgggttgacgccaatcaatattgaggcccggtttgtacagctcggtattcactcactgcaatttgtcaaactcggtagtgccatcagcgaagaattaaagatcgaactgtccgtgaaggatttttacgtctatgacacgctgtttgctttagcgcagtatgttgagcagcagtttgccgaacgacagaaacagattgggggagaaagggaggttgttgaactgtga

SEQ ID NO: 10272 - DNA, 9816 bp, Photorhabdus luminescens
gtgaatatcgccgcatttttagctgacttaaaacagcaagacattatggtataccttgaatctgactcgcttaagttaaacgcgcctaaaggcgcggtatcgcagaatatgctgactgagttgagaacgcataaggtagaaattattgcgtatctgcaagggcaacaatcaaatccattaccgatcaagaccgccgacagggaattgactcgattacctctctcttttgcacaacaacgcctgtggttcatcgaccagctctttggcagcagcgagcattacaatatggcgacggtgttggaagtaaatggcgagttcgatttaacgattgctgaaaaagtcatgcaacgaattgtcgaacgtcatgaaatattgcgctcggtttaccgagaagagcaaggagaagtatggcaggagattcagtcagcggttaaggcaaaaatcaatgttcggcatttgacatgtgaacctgccgagctgaaagcgatattttatcagtatgtttctgctccgtttgatttacagaaagatctgatgatccggatcgacttttttaccactaatactcagcggcaatttcttatcatcaacttgcaccatattgctggagacggattgtctttttctctcttgatggaagaatttgtcatccactaccaagagattaagcagaatctgccagaatctttgcctgtattacctgtgcaatatgcagattatgcttacactcagcagtcatggattgccgatggggtgtttgatgagcaacttgattattggcaacaaaaactagcggatataccgcaagttcaccaatttccattggatcttcagcggccggtgaaacagaccaactacggtgttaaggtgcgattccgattggatcggcaatcttcgtcgatgttgcgtaaacatgcgggcgatgccggtgcgactctgtttatgttattgcacgctgcattttcagtatttatcgctcgttacagccagcaaacggatattgtcattggtacaccggccactaaccgtaaacaaaaagagttacagtcactgatcgggttgtttgtcaatacgctggcgttgagaaccgaatatcagggcaaggttgatttcatgcagtttgtgcagcatgtaaagcaagtcaacattgaagcacaaatgaatcaggatttgccgtttgatgttcttgtggagaaattggcggtgagtcggaatatcgcttattcaccgatattccagttcatgttcacaatggatacgactgaggccggtgaatcgagactggatgacgtggtgtttacgccggtatcttcgggggaagcattctctaaatttgatttggaactcgatgcgattgatgacggtgacacgattctgtttgaagtggtgtacaacagtagcctattccatgaacacacgattgcaaggttactcaaatcgtttgaagtcttgttgattgatatcgccgaaaatccttataaaacattagactctttagcgttgttggatgaagacgaaaagcgtcgtttagggcaacaactggcgataccatcttctatcgcaacaacgacagaatctgtgcaatgccggtttgaacgtcaggcagcacaaagatccgatgcgacggctttggtatggcaggttgcaggcgaaacgcaaaccctgacatatcgcgaattaaaccagcgggccaaccgattggcgcatcacctaatcgaaaagggggttaggccgggcaatattgttgcgttatgtttgcctcgttcccctgagatgattgtcagtatattggctgtactgaaagccggtgccgcttacactcctattgacattgacaaccctcaatcccgaattaatcacattattacggattgtcagccggtagttgtgttgacgaacaacacatatgcagacaagtttgctgaactgaatgtcattgttgagctgttaacctcggaaatggaactgttttcagggactgcatcggatgatccgaatatcagccatagcttggatgagcttgcctatgtcatgtatacctccggatcaacgggcaaacctaaaggggtcatggtagagcatacgcagttgagccattttgtggcggcagcactggcaatgtatgccgttaaacctgacgacaacatattacagttctcctcatttgcatttgatatttccattgaagagtgttttgtcaccctatgtgcaggggccactttagtattgagggacgatgattggctcaacagcgctgacctattttggcaacagtgtggtcagcacaacatcactgtaatgagcttgcctaccgcattttggcatcaggtgagtagtggcgacgctttggtgcctgacacattacggttggttatcgttggcggtgaagccattaatgctgaaattgtcaggcattggttcgcatcagcaaaccgtcctccggtgatgaatacctacgggccgaccgaaacaaccgttttagcgagttactacttgattgaatccgcgttgcagattgagcagtcggttcccattggcagggtaggtggtcatgttaaagcctatgttgttgatgagcatttgaatttggtgccacaaggtgtcattggtgaattggttgttggtggtaaaggtgtctcccgaggttacttaaacagacctgaggagcagcagagaagttttatccaggttgcttttttcgacggtgaggttgagcggctttaccggaccggtgatctggtgaggtttaatgttcatggtgagattgaatatatcgggcgcaaggatagccagataaaaattcggggtttccgtattgagccaggtgagattgagaaccaacttattgcgattgatggggtgagacaggcggttgtcactgctgatgagattaacggtaacaaacaactgattgcatactacgttgctgatgtgccactggagccggccgcgctaaaggaacaaataagtcaaaccttacccgaatatatggtccctaatgcctttatttcgctagacagcattccaatgacggtaaacggtaaagttgactacaaagcgctattgagtgtagagacgcaagagccgttacccgagaactattgcctcccgcagggggaactggaggaacaactggctgatatgtggcagcaattgttaggccatcctaaagtgggtcgtaccgataactttttcaaactagggggacattccctgttggcgattaagttggtatcggaaatccagaaaaccttagctgtacagatctctgttcgggccgtctttgaaagccaaactttggctgaacttgcacaattgatcgttgaacaacggataacaactggcggtaatgcagcgatagcgccaattacacctgtcgctgaaatggcgcggcttccattgtcatttgcccagcaacggctttggtttattgaccagttagatgggcaaacgcctcaatataatatgccgttggcattaaccgtcaaaggggagttcaatctcgctatcgctgaacgtgcgataaacatcattgttcaacgccaccaagtgctgcgaacggtctatcggcatgataccgccggtgcatggcaggaggtgctggacaaggtaacggtgaagatcgaccgtattgactatcgaagccttggggaaaaaagcggccaacagcaggtgcaagaatttattcagcagcacgctgagcaaccatttgatttagcgaacgatgtcatgctgcgagcggcctatctaaagatagccgaagatcagtgcgttatggtcttcaacatgcaccatatcgcatcagatggttggtcaatcaaagtgcttgctgatgagtttgtcgacatataccgccaactgcttgaaggcattcagcaaccggctttgccatcgctagccattcaatataaagattatgcggtctggcaacggcaacaactacaaggtgaaacgttacaaacggatcttaattactggttaactcagcttaatgagttgcctcctgtacacgacttaccgttggatcattcacgtccattgcaacttggcagccgtggtgggctatttgaatttagtgctgacaagtctcttttgactgggctcaaatcgcttgccggtcaacataatacgagcctgtttgtggtattgcatgcggcatttaccctgttacttgcccgtcatggacaaagcccggatattgtcatcgggacgccggttgcgaatcgtttgcaggcggaagttgagccgcttatcggctttttcgtcaatatgctcgtgctgcgcacccaataccaagccgatctcacttttgctgaatatctatcgtatattcgtcaggtcaatattgatgctcaagcgcatcagttactgccgtttgaattgttggttgaaaaaatgcagccggagcggagtacaagttattcgccgctattccaaatcgtattctcgatggataccaatgaatctcaggtattgcaattgagcgacgttgaatttgagtcccttgatagcgaacatgtcacggcccagttcgatttgaccttagatgccggtgaaagtgagaacggtcttgattttagttttgaatacaactgtgaactgttcgaacggtcgacaataacccgattcagccaacggttcctgactttactgtctgcattagtgagtgagcaatatcaaacggctcctttgacgaaactgccggtgttaactgagcaggaaagacaatatctgttggtcgatattaatgacaactggcagtcttatccggttgataagtgcattcatcaattgttcgaagaacaggcggaacggagcccggaacaaacagcggttattgacggcgagcttcatctcacttatcggcaagtgaacgctcaagcgaatcaggtcgctcactttttgttggacaaagcttataccccggattcctttattgcggtttgtatggagcgaactgcggcttcggtgattaccgtacttggcatcttgaaggcgggtttagcctatgtgccatttgatgctgatcagccgttgcagcggattgaatacattcttcaagatagcggtgcgccattagttgtggttgatgatattcagtgtttgcctactgaggtggcttcggcgtacaacgtctggagattggatgaaatattaagccggtcacggcttaatacccatattgcggtgacgcagcgtcattcaaccgcgactaatttggcttacatgacttacacctcaggaacaacgggccatcccaagggcgtgatggttgagcacacggcgatgattgcgcgtttgtatggttgggatgcggtatttggtttatttcagcggccgccaaccgtattgcaaatggcgggtttggctgtggatatttttctgggtgatatcgttaagagcttgaccaccggtggccgcttggtgatttgtcgcaagtcggatttaattaccacagaggatttgtatcagcttatcgaacaacaacacgtgacatttggtgattttgtgccggtcattctgagaaatttacttgattatgctgaacaaaacagagttcgattgaattcactgcgccatatattagtgggttccgaagcttggtatggtcgtgatttgaaccgtttacaaaagctgatgcataccgatgcccgttgtttcaatatttatggacaaacagaatcggtgattgatgctagttacggtgatgtcacgcatctctgtttgcctgatgatgcctatgttcccatcggtacgccgtttgccaatacccacatttatatccttgatgcttatggcgagcctgtacctatgggggtagtgggtgaaattgcggtaggtggccccggtttggcaagaggttacaaccgcaatcgcgaattaacgcaacaaaaatttgttaaagacaacctttctggtcgttgtggttatatttatcacacgggtgatcaagcgagattaaaatttgatggaacgctggagtttttagggcgtaatgatgatcaaataaaactgcgaggattccgtattgaactggctgaaattgatgccaagcttcgtgcattgcctgatgtgcagaatgctattgctgtggtgcgggaaattgagccgggcaataaacaaattattgcttatcttcaaacgccacgaccgttattagttgaacggatcagagaacagctacggcatcaattacctcattacatgatccccagtgcatttgtctgtctgaatgctttctcggtgagtattaccggaaaagtggataaagaaaaactccctgtaccggaagccagtgcttttaccagtactgaatatgttgcgccacaaaatgacattgaaagaacattagcctctatttttgccgttgttttgaaacaggagaaagtgagtcgttacgataatttctttgctttggggggcgactcaatattaattgtgcgtgttgttgcgatggctaaacaggcgggtttggcactcagtgtaaaagatattttggcctatcaaagtattgatgaaataacgcagcagttacctgatttgaaccgcaacattgtctcttctaaagaggcttatcacgctttttcattactcacggatgacgaacgggcggcattgattgagcagtcaacattggatgatgcatattcattgtcaagtttgcaaatggggtctatttatcatcagctaaaagatgaaagttaccatattgtagagcattatttgattaatgccgtgtggagtgaacaagcatttcgtcaagcgtttaatgccatagtacaacgccatgagttattgcgtgcgacatacaacttcgaattagggagagcgttgcaatatattcataaaacgattgctttgccggttacactcaatgattggcgtcacctttctgtgcaggaatttgagcatcaattagaccattgtctggaacaggaaaatagccactttttcgttgaaaatgaattgatgtggcgagttaatgtatgtattgatgctaataatacatttgcactggttctatctcatcaacatgccattcttgacggttggagtgttgccaacctgcaagttgagtttatggaaaactatttatcggtgttgtctggcggttctattccaccaagagctgacttaccgcattacggtgaatacattgctgaggagctggcggctattgatgatcctgagcaaaaagcttattggcagcacattgccaatgctgcggtgttgcctgactggaccggaaaagcgtcaacacaacattattctgctcgccttgagttatcttatttacatgatgatttacaacaacttgctacgtgcttaaaagtaccgctgcgcaccttgttattggcaatccatgtttatgtcttggcgaaaatcaatggtactgactcgataaccagttcggtggtaagccatggaagacttgaagtgaagggagctgaatcttgtcttggattattcttaaatacgccgccggttaatgccgatatccatcaacaaacctgggcgtcgttgattcagcaattaaccgaatatagcactgcaagctggccttatcgatattatccggttgctgttatgcaagaggaattcaagtgtgattactctggcgctctgtttaactatgtcgattttcatgtgtctgatgagttacagacaacgcaagatgctgagcctgagcaggcttatgatcatgaatatgaacgagttgattatggttatgattttgtttgccatcatagttcagctaatcgttttctggttctgcaattagcgttgacccaatcggtatttggggcacatcaggcggggcaaatattagcctgttatgaaacggcgataaaatcgatgttagcttcacaacatcatcgcttggggcatgcggattatctggcatccggtcaaatccaacacttgtatcaattagcccataatgcctcatctattgctaatgattgcccatctgtgacgcaattatttgcccgaattgcgcgtcggatacctgatgaagtggccttgtcagggccttggggcagcatgaattatgctcagttggcgttagcggctgacaaactggcgacactccttattgcgcggggtatcggggtaaatgatacggtgggtatttatttatcccgtactcctgaggtagtgattagcgtcttggctattttgaaggcgaacgcgacatttgtaccattggcaaccgattatccaacagaacgtattgcccatattattaatgatgcggatattcagcttattgtttcacaacgttctgaaagccacactttgcctgttgatgaacaacgtattgttatggttgatgagattgactcggttgatactgcggttgtggcacgagaagtggcattatcagcgcaagagcgtgttgcttacatcatgtatacctcgggttcaacgggtacgccgaagggcattaagatcagccatcacaatttactgagctattatcaggcggttcaacgctgttatccggcaaattctgcccacgcggtattgcaaattgccaacattggttttgatatttttatcgaagaattaatgttgtcggtattttccggtggtcgtttggttctggataatcataaaacagcgtatagcgttaaacagttatgtcagatcattgatgcacaaaaagtcacactgatttcagtacccacagccttatggcatgagtggacgtatcagttaactgctgacgatgttgaacaactggttgagcatttgaaggtatgtatcgtcggtggtgaagccatgcgaatggagttattggcgctatggcaacaaaaaacacaaggaaagatccgtttattcaacacgtatggaccgacagaaacaaccattgtggcaaccgctattgatgtcacacaattcgataccttaacaaattcagtggtgccgataggacgtcctttggcccattgtcagacctatgttttggattctcagggtggattggtaccgccagatgttattggtgaactctacattgcgggtgatgctttaagtttaggctatgtgaataacccggaacaaaatgcggcacagtttgttgaaatggctatcttgccggaacaaacagtaggtttatataaaaccggtgatcgtgtttattggaataacgagggtgaactggtttatgtcggtcgtcttgataatcaggtcaagatcagaggttttcgtatcgaaacccgcgaaatagagtcagcattgtcagctattgatggtgtggcgacaagtattgtgcgggttactgtcgatgcaaccagcgaaaaacaactatgtgcctggctggtgatgccagaggggaccgaaacggatgctgtcatccccccgataagagagcaactgaaaacccgattaccagagtatatggtgccaaccctatatgctgtgatagccactataccaactacggctaatggtaaagtgaattttgctgccctacctgagccaaaaccttgcattacgcgaggattggatcgtgttgcggaaactgaaattgaaaaacagttggtacaactgtgtgccgacgcactgaaattaccgtcaagcatggtgagtttagccgcgtcttttatcgaattgggagggaactcattaaccttgttgaggtttttacatcagatacaacagacttttgctgtagtgataagcattgccgatgtcatgacggccactaatctggcagtactggcactgatgattgagcgtaaacagttgcaacaaactgaacaaagccatcagggatgtaacacggtggcggaagaaggctggttatga

SEQ ID NO: 10273 - DNA, 1839 bp, Photorhabdus luminescens
atgcgagttattgatattattcggcaagcttcggctgcgggcgtgcagttatttgttgagcgcggcaaattgggttttaaagttatatcgggttatgtttttacccctgaactaaaagccttggtagtggcgaataaagctgaaattattgcttttttagcgccagatgaagccattaaattggtgtcattgggtactgatcaaacgccattatttttggttcctggtgctgattctttagcatcatcttttgttgatttggctgagaaaataaaaaccgatttttgccttaaggtatttgatgcaacctccctattattggggggtgaaacactttctgtcaaaacattggctgaacgttatgccgcattacttttgcaagcttatccacaagagcattatcgactggcgggttattgtgtgggagcatgtacagcctttgaggttgctttggtgctggaaagtgaagggaaaaccgttgacttgatggttattgagagttttcttaccgcctatgaccgacaaccttatacccatgaggagatcgatgatgtgagcaccaggttgattcaaggtattgaaggtgaagctctggatcgctttattgaggcttataaaatctactctattatggcttgcaattatgtaccatcggccaaattaaacggcaggatgacatttatttattgtgaaagctccatacaactacgggcagaaaaaaagaaaattattgcatcgttacaagattatgtcacacaaacgattacttatggcatggtaagcggtgatcattactcagtattaaaaccgggtgccgttgagactctggctgatgccatattattacagcattaccgaccagaaccctcatttaaaaaattgaacttaacctatcaggcgttgcttgacatggtgcaatatcgggccgatatttatcggcctataggtgatatcaatagctatcaccgggtagtgatatcgcaggtcggatgttggtttattgaaataacagatgagcgtgtacatattgatttcaatgctaataatacaatgtgtgcgcaatatgatttttatagtgagattgaaatcagtgtggacacattaatagcgtgcgcaaccagtgaggagccgtccgctgctattgctaaggcgatattggataataaaattcaggtacaacgaggagaaaatctttatcacttattatggattgtttttggcgtcacggaacctgatgagatttttgactggattgaacagcaagacagccaagatgagcatttaggtgttcaaacgaatggaaggacttttaacgataaatggcatattgattctcatatttgtactcgctatatgcctgctcattacagtgtgattcataaggcattaatgtctctaccgatcgaatacagtgactttcaatttatcgatttggggtgtgggagagggcgagctattatatgtgcatccagttacaactttagcaagattaccggagtagaaattgttgaatcattggcattaattgcacagcaaaatgttaacgcgataaagcaaaaaagtcatattgagataatacaagctgatgtaaacgactatcgatttaatgaaaaccatgtagttatttataactttgatagttttgttaatgatcaacttaagcaacttctacagtggttgaaaatcgatgtttatgataaaggttataaagtgttgattttacaaattaatggtgatgatgctatttatcaacactgtttttggttaacgccgaaaataattagccgaggttttatggggggatggaatatcactctgtggcaaagtgaaggttgttaa

SEQ ID NO: 10274 - DNA, 1677 bp, Photorhabdus luminescens
atgatctctgatttggttaaagccaatcggttaaaaattatttttaatagtattgttggtgcttttagtgctttctttagtatttggttaatttccttgattaccgatgatgcattagaacagattagcgctgacttagtatcatggacagttaaattcttcatcgggcttgcctgcttgtttgttgtgagttcttttgctaattacttaatgacaaagttaagcgtcaaaattatttttgaagttcgtagtaccttagtgaaacgtatcttgaataccccttatgctattttggaacggattggcgggcataaagtccaggccagtttaacatctgatgtgagtgatatttccagagctatttctaccatgccgcagtttatttatcatgtgattacagtgattgcatgtttaggttttctggcattcaaatcgattgagctgtttatggtcacgttggtcactctcccgttagggcttttggtttcgcgttattttattagtaaagccgaagcttatgatgaggtatatcgtgatgattatgatagccttcatgaacagtttaaaagtctggtagatggagttaaagagcttaataataatgaaaagcgcaaacattcattttttaatcgaggtgttttaccatcattagaaaagattaatgactctgatcttaaatcagaaattttctggaaattgaatgaaaactgggggcaaatattattatttctggtgcttggatctattttattttctcacgttatgtgggagataggagaaagcaatgatattcttacctttatctttattatgacctttttgctgggccctgttgattttattttgtcctcacaggaaaccatagtaaaggcactcatatctctacgtaagattgatcgcttaaggttttctgaaaacttatcaatggagccaacattaaccaacacaggagagtttaaagaatggtctcgaatttccctgcgttccataagctttaaatatgccggtgaagggaattgtttttctgttgggccgattaatctggatattcagcgtggcgaaattatcattattaaaggcggtaatggcagtggtaaatcaacttttgctaaattgttgattggtctattgaataaatctgaaggtgatattttcatagatgataaggtggttaatgaagataatcgagagaattatctgaatatgtacagtgttattcattcagatttttatctatttgatacagtaattaatcgaaaaggtgaacttgccgatgatgaattaactcgtcaatatctgaaaaaattggatttagcagaaaaagtcacggttaaagatggtagattatccacaactaagctttctcatggtcaacgtaaacgcttagctctggttatctcttatatggaagatgcgcctatttatttgtttgatgaatgggcagccgatcaagatcctaattatagaagatttttctatcatgaattactttctgaaatgaagcgcaatggaaaaaccgtcatcgttattagccatgacgataaatattttcatatcgccgacagagttatcactatggataatggtttggtggataatattgaaataaacgtacaccccgataaagtagaaaatgctgctttagagtccgctatttctactatgtatacccaatag

SEQ ID NO: 10275 - DNA, 789 bp, Photorhabdus luminescens
atgaagggtatagttataatcgctcgtagatatcaggaggttataatgttagaactatttgaagatcaattggctggaattagagaaaaatatgggagtgattgtttaaaaagagtagaggatatgttttatcctttactacaacaaagagcgccattacaagcagatgccaagtatatcatgcccgggctttctaccacgccgtggttggatacgaattcttttccgcagttgcagccgttagtcacctcattgatgaataatgcggataaaataaaacaggaaattaacgcggttatcagcggtgagtcccaatatatcaccgattatgagcactatttgggaactcaaaaagattggaaggcattatatttatttaaaaatggtcagcctaataacgcggttgccaatattttgcccgctacgtggcatatttttaataatgaattaagggattggcattgtcctctgttggaagttcacttttcggtgttgcaaccaggtacggtgattaaaccgcattgtgatttatggaatttcactcttaatttacattttgcggtcgatattcctgctagccattgtgagatcattgttgccaatgaagccagatgttggaaagaaggtgaatgtttactgtttgattattcttatcagcatgaagcttataaccgctcagataaacataggatttgtttattaatggatatctggcatcccaatttatcatttgcagaacgggaagcattggttttgatcattaccggtattcgtaaacttttcggttag

SEQ ID NO: 10276 - DNA, 981 bp, Photorhabdus luminescens
atgaatagaaagaggcaatacatggtgtctgatattcaggagtctaatgacttcgtttttgagcttgactcaacagagcagacatatttaaagcagcaatttttagagtctactctaaaatatgacattgataatttcgaggaattttattggaaatgtttttatcaatcgtttaatttgcctgtgcgtttacagaaaaagttatttgactttcgtgcattagaaaatgaaaattatttgctgataaaggggttgcctatccctgatgatctttgcttaacgcctttatcttatgaacaaacaaatagttctgaggtggcgggggttcgtactttgatatcaacgattttatctcgaattggatatatttattcgtttgttaataaaaagaactttaattttatcgatgatgtttttccaatggaaaaatataaggatatgcagttagggacaaacaaagagtttttagaatggcatgttgaagatggtttccatgatgcaaaagcggattgggttgctttatattgtctgcgtggcgataaaaatgctgaaacctacttgtttcaaacaaagaatattcatttggatgctgaaaccattgctgaattgcaaaaatcaaactttgagattgatgtcgatccaacctttgtatcgaatgtcagtggccgccgttgtgttgccgtattaagtcaacataaagaaccagaaatgatatttgatcccgcttatatgcgttgtttaacaccaaaggcagaagccgcgttggaaaagttgaatcagtgtattaatgaaaatagagaggcttttatattatctcctggagacatgttgctatttgataaccgtaaagttgctcatgcacgcagcgagtatgaacctcgatacgatggttatgatcgttggttactcagagcattaatattggaatcaaaattcaaagccagagattacttttatacaggtactttaagggcaaaataa

SEQ ID NO: 10277 - DNA, 2424 bp, Photorhabdus luminescens
atgacatcatttaaaacaatattatttaaaacaatatcatttaaatcaatcacattactgttgattaccttattaacaataagttgtagcggatttaaaagttattcagaaaagacgaagacagcatttgaagcgaaaattgttcgtactcattatggtgtccctcatatttatgcacacgacttgggaagcttgagttttggcaatgcctatgctcaggcacaagataatatatgcattatggcggatgattatgtgcgcattagaggggagcgtgcgcgtttctttggtgctgatagagataagcagggggactcactgaatttaattcaggacttcggttataaaacgttagctttggtggaacaggcgcgtgaaaaatggccgcaattaagtgctgattcacaggtaattattgatggatttgttgcaggttataatacctacctgtcccatgttaaggaagggcgttataccttaccaaaagcttgtcgagatcaagaatgggtagcacctattcaacgtgaggatgtattggcatatgtattttctattgcggtatttcctggttctgctcaatttcttgctgattattatgcggctgatcccaataaagaagatcaaaaacaattgtctttaaatatatctaggaataatggttattccattggttccaatggttgggcattaggccgtgacaaagttgaagaagtcaatggtatgttattggctaatccccattttccttatgaaggcaacatgcgtttttggcaggtgcatcatgtcatgaatggaaagattgatgttatgggagcgtctttaattggttttccgggtattattaatattggatttaatcacaacattgcctggactcacacttattcatcggctgaacatgtcattgtttataaaatgcaaactgctgctaacaatccgctcaattatgtgattgatggtgttattaaaccggtaatgtcgaagccaattcatattgaagtcaaaactgatagcggtattaaaacggtcacgaaagatcatttttatactgatattgggcccattattgaaaatgaagactttgcttggtccgagtctgaattttatgtcgtgaaagatgtcaatctttacaatcttgatatgattgatcattggttggcgttgaatcgagcggatagtcttgctgatgcaaaacaatcttataaagattttaatggtttggcttttaataacacgttgttaactggtaaagaaggcgttggtatttttattggtgataaagctgtaccggcattgtctcttgaagctattcaattattgaatgataacgaaactttggcggcagcacgtgagaagtatggcgtgactattttaccgggtaactcatcatccatgatttttaccgaagccttgggttatgatcagatcccacagctcgtggaaacatcctatgtacaaaattccaatgattctcactgggcaacgaacttggaacatttactcgaaggtttttccccacttctgggtaatgaacgaaaacccctgtcgttcagaactcgtatgggattgcaactaatacaggatgcggcgggtgataataagcgattttctctcatggagttagaacaggcgttattctctgagcgttcatatttagccgaactgatattaaaagatgtggttgccctatgtgataaaacacagaaccgattaattagattggtgaatggcatgaaggtcgatattactcaggcatgtcaattgctatcacaatggaacggtgaatttaatgcggatagtcggggcgctattatattccgtgaattagcttttttaattgatcagcaaaaacactttgccgtaccgtttgacatagcccacccggcaacaacgccacgccaattaaaacaaagtgaagagtttgtcaccttgttagcacgagcggttgccaatgtgaataatgtggggctggctttagatactccggtgagtaagtttcaatttattgaaagtaccgcacctgacggtaaaccggccgataatcgcatgagttggccggggttgtttggagaagaaggcggctttaataagatcgctgcatgggattgggatgaaaccctgtttcctaaacatcattatactgtgggtaatgatgtggtgactggtgaggcattggaatcggagctaactgatcaaggatatcatattcgttatggttctagttggataatgctggtggcatttgatcaacaagggcctaatgcgcgtgggttactcacttattcgcaatcttctgatattgattcgcctcattttgcagatcagagcagattttattctcattataaacagctattgccgttgccttatcggccaaaagagattaaacgatcaactatttcagaattggttatcaaacattaa

SEQ ID NO: 10278 - DNA, 834 bp, Photorhabdus luminescens
atgatggatttttctaattctggttatcagaaatgcgtagagttcaccatgccatccatagaggatgtgtttgcttgtatgataaatagagttccttttattattcgaggaggcgctgaacagtgggtagcaagaacaaagtggacatgggactattttcagcaaaaatttggtcatcatctgataaaagtatttcgatcatcaaataataaagataataaatatatgtctcttggtgactatattgattatataaaagatatggaagaacctgatccttattatgcctctgcgtggccgttttcgctctattttaaagaattggtgagtgattatgaggtccctgactatttttcttgcttaattcgtcagcgtgtttcagacaatattttgcataatgaagcggcattactattacttcgctggatttatatggggcctaaaaacagcggctctcgtatgcacttggacattgcttctactcatgcttggaatgcggtgatgagtggtcgaaaagagtgggtattttatgggccggaagaagcaatgaaaataggttatggcaacgttgatgcttttaaccctgatttggctttatatcccgatttcattcaggctcaaggtattcattgtatacagaatcctggtgatattgttttcacgccttgtacacactatcatcaagttaaaaatttggaggcaggaatttcaatcactgaaaattttattaatgacacgaacttggagctggttaagcattccataaacaacgacgatgatatatcaccggaacaagcaaattttattcggatgttaattcctgagttaagttaa

SEQ ID NO: 10279 - DNA, 147 bp, Photorhabdus luminescens
ctgaaaggtttaatacttaaggttcagtgcgagaaaggaacaaccatatgggaagttgtctccgtgttcaaagagatgtatgactctgatgtctttcctgcacttactattaaaagtgacgaatgcggtaaaaggatagggcattga

SEQ ID NO: 10280 - DNA, 186 bp, Photorhabdus luminescens
atgtcccatgattttaatgaaaatcagcacgctactatcaatcacctgccggtaatctgtgattctgacattgaagatgctggcgggcaagagaaaacaacttcttgtaattgcattgtgccgaatcatacaatctttgcaggctgtaagcagctcaagatatctggaaacaacagaatacaatga

SEQ ID NO: 10281 - DNA, 966 bp, Photorhabdus luminescens
atgaatcgctcaacctactttaatttatgtgaagaaaagctttcatttctatgtactcgagtggagctacgtggaaagttgaacctactcgatttgcatcttcattgtgaagacttttacgttcatttttttaatctactctttgggtatgttttgaagaatgttaatcagtatactcacaatgctgaaggtatcgacttgattgactctgttcagaaagttgtgttacaggtttcttcgactgcgactaaacaaaaaattgagtctgctctgtcaaagaaccttacaacatatagggggtacagcttcaaattcatttctatctcagatgctagcgcattaagaagactttcctataagaaccctcattcattggtgtttgagcctatatttgacatacatgatgtcagatctctactagatcacattctccatttagatattgtcaaacagcaagcagtctatgaatttcttagcaaggagttgtcatcggtaggtgtgaagaatccacttactgaaacgaacattgctgctgtgataaatatattagcgaaagaaaatctttccgatatgccgagtgtggacaaaccgactccattcaatgttgatgaaaaattggtttttaacgatcttaatactgcggctatggttgttgaggattacaaaattcaccacggcagactaagccgtatttatgcagagtttgatgtggctggtcaaaataagagtaaatctgtccttgattcgttacgtaatagttacattaagttgtgtactacatattcagctgatgaactattctttaatatagttgatcgggctgtcacagtagtcaagcaaagtgctaattatgtatcaatgcccctggaagagctagaactttgcgtgaatgtcattgttgttgatgcattcattagatgccgtatttttaagaatcctaagggcatagaaaatgttgttgcctaa

SEQ ID NO: 10282 - DNA, 228 bp, Photorhabdus luminescens
atgttgttgcctaaagacattcatcctactaatagcctttactttaatggagcttatgtgcttcaggctgtaagacagtataaagaggtcagtatgatggatctctttgtggagtctcgtaaattacgtgatattccgatgccgattttcgttttaacgttagattggttatttcttgcagatttggtttcatataacgatagcggaaatattgtaccatgttcctaa

SEQ ID NO: 10283 - DNA, 1731 bp, Photorhabdus luminescens
atgttcctaaaatcactccgaatttccaactctgaaggtgtaatccgtcacattccttttcacgcgggcttaaatctcatcgtagatgagactctctcagggccagagcagactactgggaacaatgttggtaagacaacagtattaatgttgattgatttttgtttgggagcaaatggtaaaggaatttatactgacccagagaatcgcaaaagcgaatatgtgcttgttaagaattttctcattgacacagctgttttagttactcttactcttactgctgacttagataacccattcgctgaggagcttgttattgagaggaattttcttccacgtaagcaaattattcgccggatcaatggtcatcaaaaaactgctgacgaatttgaggcggcactcactgagcaactttttcctgggcatttcggtaaaaagccaactttcccacaaattatttctcataacatcagatatagagagttgagtgttataaatacgcttcgtaccttgagtgaatttactcgagatgatgaatatgaaactctttatttattcctcttgggatgtaattttgatcaaggcgataccaagcagaatctcctggcaagcattcgtatggagatgtcctttaagggtagacttgagtcgaagcaaacccgatctgcatatgaagcttctatggctttgctttctacagagattgctaaactaaatgaaaagaagtcggagttttatatcaaccctaattttgaaagtgatcttgagacacttgatgagattaaatataaaattaatgtatcgagttcagttattagtaggttaaaacttcgtcgaagtttgattgatgaagcaatcagagagataaattccagccatactgaaattgatactaatcaattaaaggcactctacggtgaggtaactgaacgtttgtcaggtgtacaaaagtcgtttgaggatttgttagaatttcataatcggatggtggatgagaaggcacgttatatagctaaagagattccagcacttgagcaggaattagttgttagggaaaataagctagcaagtttattaaatgaggagcagactttagccgcaaaaattagtaaaagcggctctttagaagaattggaatccttaattatagagttgaatgaaaagcaccgtcgaatgggggagtttgagacaattattgagcaaattctaactgttgatacaacccttagaaatttgaataaatctcttaatgaaattgatgaagaattattttcggcagattttgaatctgcaattcaaatgcagcttaataagttaaataagtacttttcctctatttctcaggaactttatggtgagcaatatgcattaaaggttgaccgaactactactcgaactgggcaaagaatatataaattcagttcattcaatacaaattttagttcgggtaagaagcagggagagattacctgtttcgatatagcctataccctttttgcggacaaagaggggattccatgctatcactttcttctaaacgataagaaggagctcatgcatgacaatcaactaacgaaaattgctatgttagttgagcgagaacataaacatgttcaatatgtggcttcaatcttgaaagacaagttaccgccagaacttaatcaagaaaagtacttcgttctcagactatctcaagatgataagttatttaggatagaatcaagcaattaa

SEQ ID NO: 10284 - DNA, 507 bp, Photorhabdus luminescens
ttgtcgctgatccaattttacacatcgcggagtcgtctgccagcttggctcggtatattcgcgatactgatgttgttcattgcgccagtgatttcccggtcactggaacatgcgcgcagcattagtgaggctcattcatcgaaagtggtcgattgccatagggtgatgtcatctgacgatgatatacctcggaatatgtctcattctgacgtttcttccgcatcacatgttactaagttatatagtactaatagtactaaccatcatgatggcatgcagatgggtatgcatagtgttggtatgtcgatgttggaggatattgcctgtggatactgcgtttttctgatccatatacctatgctggatttggcgaatacaccgctattttggtcaacttcgctgacttcacggccaccaccgattcaaaccgtagcctcctttttgccgcatttcatcttttctgattcgttgcctcgtgctccgcctgaaccgatctcatctcattga

SEQ ID NO: 10285 - DNA, 2031 bp, Photorhabdus luminescens
atgccactttttttgctagcgacttttaatggctatgcggctgaaaccgcagcggatgtacacgaccatgtaaagggtgcaaaaactaatgatggggatgtgattaccgtaacagcacctttgtattctcctttggcaattgttacctcgccaaaaacgcctcgtcagccggttccggcaagtgacggctctgattatttaaaaaccatccccggattttctcaaatccgtaatggtggcaccaatggcgacccagtatttcggggaatgtttggttcgaggattaagcttttgactgatggtgcagaaatgctaggagcttgtcccggcagaatggatgcgccttcatcctatatttcgccagaaagttatgatttgctgaccgtcattaaagggccccaaacggtattgtggggggctggcgcttcagcagggacggtaagatttgaacgtgaacatccgcgatttgatgagccgggagtcaaattcaatgccagtggattgacgggttcaaatgagcgttgggatggcaatgtggatgccagtattggcaatgaattgggatatttacgtttaatggcaaataaatcccgttcaaatgactacaaagatggtggtggatatcgcgttccttcacgttgggataaatggaatagtgatctggcgttagggtggacgccggataaagacacattgtttgagttcaccgcaggaaaaggggacggagaagcgcgttatgctggacgtagcatggacggttcgcaattcaaacgtgaaagtctcggtgtgcgttttgagaaatctaacctcggtgaggtgcttgataaggttgaagcccaagtttattacaactataccaaccatattatggacaatatcactttgcgttctccgaatagcgccatgtcaatggggatgtcttctgcgggttgtaaacatggatgtggtatgcacatgaatatgaaccacggtatgtcgatgcaactggatcgtcgtgttatcggggggcgagtcatgggcacctggctatggcaagacttcaaattggaaagtggcgcagatacgcaaaccaatacccatcgtaataaagcaggtaatgtatggcaaaaggatgctcaattctacaactatggcctatttagtgagctaacttggtatgccacagaacagagcgaattgataaccggtgcccgtcttgatcgcagccgagtaaagaaatttgcgggtaatagtgaaaaagagcgtaatgatactttaccgagtggttttatgcgcttagagcatactctggcggctatgccaatgatgttttatgccggtattggttacaccgaacgtttccctgactattgggaactgttctcgcctacctatggtccgacggggagtaccagtgcttttgatggggtaaaaagtgagaaaaccactcagcttgatattggtgcccaatataccggggaacgttttaatggttgggtatccgcctatgtagggtgtgtaagtgatttcattttatttagatatagcccgacaaacgcccgtattagccaggctgataatgttaatgccaatatcatgggcggagaaatgggctttggttatcaattgacagatcattggaaaacggatgccagcctagcctatgcttggggagaaaaccggacggataacaagccgatgcctcagatcccacctctggaagcccgcttcggcttgacctatgaacgtggtgattggagcagtacaggtttgtggcgattggtgagcagccagcatcggattgccgtggggcaggggaatgttgtcggcaaagattttcaagatagttccggtttcggcgtgctctctgccaatgttgcctataaggttaacaaagatataaaagtgagcgctggcattgacaatatcttggataaagaatatagcgaacaccttaaccttgccggtaatagcacctttggttattcagcgaatacctcagtgaatgaacccggccggacagtgtgggcgaaagtagatataaagttttaa

SEQ ID NO: 10286 - DNA, 795 bp, Photorhabdus luminescens
atgaaaattcagctaacttatacattgctattaagcacactgttcagtggatatgctctagcacaaatccccaatgaattcagccctacaccgttatttgaagataatttcgatggcacaatacttaatacccaaaagtgggattaccgtggcctgggtgtcagaaaaaattgtattaatactcaatcagcggttattgtgcgaaatggacatttaaccataaaaacctattccgatagctcttctggcaagctacagaattattgcggcatgatttcaacacaaaaaagttttctacaatcatatggctattgggaagccgctatcagatttaatcgtgcggaaggtaatcaagttgcattctgggtccagtcaccgacaatgggcctcgatttaacaaatccaaaaaaatcaggtgtcgaaattgatgtatttgaacatttagctgaagcgacacaggatcaatatgatcacgcaattcactggaatggttatggcagcgctcataaagaatggtcaaagagattgtctacaaataaacttgctgatggtcaattccataaatttgctgtggcgtggacaccaaatggttatacattttatgttgatgatattccccaaaatctgtctggactagatcaagttccaatttcaatcgccaaccaatatattattttgagctccgaagtgccgcgcagttatccagcacagggttatggcccgataaatgaaacaaccgcaacattcgatattgattatataaaagtttatccgtatatcggtaataagaaataa

SEQ ID NO: 10287 - DNA, 1275 bp, Photorhabdus luminescens
atgaaaccagaaactcttgctatccacggcggatattccccagatccaacaactaaagccgttgccgttcctatctatcaaacaacatcctatgcgtttgacgatactcaacatggtgccgatctgtttgatttaaaggttgagggtaacatctattcccgcattatgaacccaaccaatgatgtattggaaaaacgggttgctttactcgaaggaggaatagccgctttgaccgttgcatctggcatggcggccgtcacttgcgcaattcaatccattgctagcgctggagataacattatatctgttgctaagttatatggcggcactcataacctgctagctcacacattgccgcgattcggtattgaaacacgatttgctgaacacgatgatattgcagcattggagtcactgattgatgatcgtaccaaggcggtattttgtgaatctattggtaatccagccggtaatattgttgatctgaaaaaatttgccgacgtcgcccatcgtcatggtgttcccttaattgttgataacactgtcgccacgcctgtgctttgccgccccttcgagtatggcgctgatattgttattcactctttaaccaaatatatgggaggacatggtaactctattggcggcatcattgtggattccggcaatttcccctggaaaaaatataagcagcggtttgctatattgactaccccggacccctcctatcataacgtcgtttataccgagcaatttggcaaggctgcatttatcgggcattgccgtgtggtaccgctacgtaatatgggcgctgcactgtcgccttttaatgctttccttattctacaaggattggaaacactggcattaagaatggagcgtcatactgaaaatgcactgaaagtcgctcattatctgcaagagcatcctcaagttagttgggtgaaatatgccggattgccaaaccatccagaacatcaactggctcaacagtatatgaatggaaagccctcagcgctcctctcttttggtattaaaggcgggcaacaatccggcgcgcgatttattgacgcactaaaattaattgtgcgactggttaacatcggcgatgctaaatcactcgcctgtcatccagcgtcaacaacacatagccaattaaatgatgaagagttaattaaagctggcatatcacaggatatgattcgcttatcaatcggcattgaacatatcgacgatattattgccgatcttgcccaagctctggatgcatcgaaataa

SEQ ID NO: 10288 - DNA, 1362 bp, Photorhabdus luminescens
atggctaagttttcaaactggcgggagttaaaacaacttttatttttctctttccctatcatcgttagtcagatagcacgcacagccatgagttttgtggatattgtgatgtctggtcactatgctacggctgatttagccgccgtaacattaggaagtagtatttggtttcctatatttgtattaggatatgggacgattatcatgctggcagcagatgtcgctaagcagaaagcgcaacatgatgatgaagggattaaagacagtcttaaaaattacttgtttctggcggtgatactttcgataccaataattattttattaatgttagttagctggctactttcgtttataggcatcgatgagcatattttagaaattacccagggctatgttattgctctggcttgtggtgttcctagcgttatgatatttaatgtttttcgttcatttctacaaggattggaagacacaaaaatcgcaatgtatttgtctgctggtgctttattattgaatataccattaaactacatacttatttatggaaaactgggtttgccagaaatgggaggtattggcgcgggtattacaactgcaattattaataatctaattgctgtatgcctgattatctattttttgctaaagaaggaatatcggcgatataggccagatttcagtttaccaaaatataattctttaattagaactttttatattggtatgccaagtggattggctctttttgttgaaatggtttttctggatgtgattgcgataaccgctgctcctttgggggcgcaagtcattgctgcacataatattatgcttaatattacctctatcatctataccataacagggggaattgcagccgcggtaactgtgagagtcggctcctatattggcaagagagataaaatatcattaacaggtactataaaaatctcaattgctttgattttatctatttccgcagttattggtgttttaatctattatttcgcaggttcatttatttcactctatactaacgacaatggcgtcataataattgcgcttaacataatctttctgttatgcctgttccaattctttgactcttgtcaggcggctttatccggtattttacgaggctttcatgatacccgatcggtattttacgcgccgttattcggttattggttggtgggtttgccattagggtttattttggctttgacagattgggtaaccgagcgtatgggaattatcgggttttggtatgggttggttttgggtctttttgtgaacgctattttgctgtttatcatattaaaggttagacagagaggaatgatttctcggttaatttcatattaa

SEQ ID NO: 10289 - DNA, 747 bp, Photorhabdus luminescens
atgaacaaagttaaagtgttaattgcagtattaggtacatgtgggttagtaacacaagctatagcggccccaggttttgggcaaactcaaaagtttgatgagaataaacctagcgttaacgtaggggtgactgaaccacgtggtggtggtcacccaaccttaggtggagagccggggattggggtgcaatctatttctaatggtaggattattagcttttcaagccttgctgcttatgtcaaggcggatacaaatggaattcataaaatttctatgcctggatcgggtagtcatggaggcatgggggtattcaactttagtaaagtggctgatgctgatgtctattttggtgaatggtcacaaaccggtaaggtgaatgatactactcatactgcctattattccggtaaagatgtcacgactaatttgcctaccggtggtattgcaacttatacggttaaaggaattaaccaatatagtggtagcaatgctctacatggaacatttactgctgatttcggtcagaaaagacttactggttcaatagcaaatagcgcactcactgtcggtattaattctgttattaaatctgatggctcatttgttggtagtgcgactgctggaggtgctgttggtagaaatagcggacatttctttggtgataatgccgctagtttagcagggactgctacgtttgctgcggaccatagtaaagataccgcctttggtggaactaagaacccgtaa

SEQ ID NO: 10290 - DNA, 1500 bp, Photorhabdus luminescens
gtgatattaccgatgctaaatacctcaattgttcgttttactttactcattagttgtttgtttatagagccatctctagtgttggcagatgaagataccggtagaagattgtggtataacgtacagcgaaatttgcaggatcaagaaaaagcgttggtcacagatgaaaccgtggataaaaaaacggatcatttattgatagtccttaatggtcaaacgtttagtgttgaaaacaatgtgaatgatattggtcaggcgctttatttagccattaatcatcaacaagtgcaggatgttgagcgttttttatcgatgtaccagaaattacctggacatgatacccaattggtccattttgctcaggcaaatctggcgcgtttacaaggtgacttagtagcagcagaacagcattatcaggccatcttgcagcaacaacctgattttacccgggctaaattagagttagccagagtctattatgagaatcaaaagaatagagaagccagcttactatttaatgagatttcagcagttagtcgcgataatgaaaataaattaccaccagcagtcattaagaatataactaattatcaggaggcgattaatttgcgtaattcctggcgtggatctttctccgtaggatatatctttaacgataacacgaatatgtcgtcagataagcctcctgtttgcactctctatcgtgaaaatggtgagtgtgcggttgaacgtaagctgcctatggcaaagaaagcgaatggtattagttatgatgctacgttacgtaagatatatccgctaagtggtcaccacggtgtctttttacgttcgatgacttatggggaaagttatcgtcatcatagtgaggagaatgaaaatacgacttctgcttattttggttatagttataaagcgcaaaaaaatgatttcctaatggggccagttgttgagtttaattctgttggtaaccattcccgttatcgtactacgggaataaaatctgaatggatgaatattttatctgaaaatttggtattgaatttggaaggtgaatataagcagtttcgttatcataaactttataatcataatgacggtaatatggcctctgtttatgccaccttatcttattatttaactgatcagacaattacctttgcgggtggtgattgggttaataaaactagtgttgagaaagctgacgattatcaacaaaaaggtgtgagagcaggcatttcaactcaattgtatccgggaattaatgcagtggtatttactgtattacgccagcggcaatttggtgattacagtgtgcctctaaatgcacgtcgtaaagataatgaacaattctatgcggcaattgtgagtatgcctaaatttgaagttttcggtttaaccccagtaattacttatcggtttagaaaaaataatagtaatgttgattggctctattcctataataagaatgaagtgttagtcaagtttgaaaagtatttttga

SEQ ID NO: 10291 - DNA, 3045 bp, Photorhabdus luminescens
atgacgggtatatttcaatccccactatggcagataatgattatgtataaattaaataataaatatagcaaaataacattcatgctggcattggcttacagtatgatgccctaccgtgttgatgccgaaacatcaatagcttctgctcagccatctaaacaatccactgaaaataaagctgaccttggtaaaattaacgtttcagcgaccagtgaaaaagatgaggcaggttatgatgcggtttatgataaagatattaccaatatttatttgggtaaggatttggtagaacgctataaaggcgcttcaccagcggatgttttaaaaagtgcagttggcgtatttagtggtgattcgagaaacagtggtgcattagatcctaatattcgaggtattcaggggcagggacgggtgcctgttaccattgatggtactgagcaggcaattaccacctggcgtggttataatggtgcgaataatcgtaattatattgatcctaacttgatcagcagtattgaaatagaaaaaggtccgtcactgacgcgtggggtaaaaggctcaatcggtggggccattatgataaaaactttgggtatcgatgatgtggtaccaatagatgaacgatttggtattaatttgaaattggaaaccagtagtaatgcggttaaagaacgtgtaccgagtttgacatggggacaagattatcgagatattcctggttttactaaggggtttaattatgttgatcctgcgctagaaattacgccgaaaacctcaaaagataataaattattgggtctgaaagataatgcaatacgtttggcaatcggtactcgccaagagctctttgatttaatggcagcttatagttaccgcagtaaaggaaactattttgctggcaagggtggtgctcatcgctatgatgatcccatcagtaaaaaggatatagagatccttgatggtggtacccggtcgtatgatccttatttgccttttgtcgcacgtatatatcgccctggcaatgaggtacctaatacctccagtgaaatggaatcttggttagttaaaaatacttggtacttggctaaccaacagacgattgggcttggtatccgcgacactaaaacgatttacggggagattatgccttcgcggattggttgggttcgtgctaaagataatgttgtatcgcagtggccgttggcgaatgtacatcagcaggcatttaatctggattataagtggaaacctgatggaaataagtgggttgattttgatatgaaattttggattacccgtactatcagcgatactaatactgccgggggatatccacgtgaaccgcgagaacgagatgaagtatgggatgtgaataataagcaaagagatccgaatattgatggtcgtctggtagatactgcttctaccaatgctcataataaccgttggggtgttgatctttctaatgcttttgcgttgaccccggatctggatttaacattgtcagctaatctacaacgggaacgtttaggttctcatgatgattatgaagcaaaaagtttttctagttttcgttcgctaccaagaaaagggcgccgtcaggagaataatattgcttttaattttgactggcgtcctacttcatggttggcattaagtgccggagctaaacgagtcagttattggtctaaagatgattttttaaatgaacgtttagctgctcatgatcttcgctatagtcaggataagaaagtggttggtaagggactgcaatatatgagaacacttactgatcaggaagctgtattgtataaaaaatatagcaattgcgctgatgattgtttcgatgatttagatgaatttctcgaatatgaagaaaagaagatcacagaatcagaagaacgggattcaattcttcgccctatggcaccggtagatgtgctttggaaatatcatgacgatggtaagttatataaacaagataacccttatttcaatggggaacttgatatgaatgagcgcgttattgatcctgtgacgaataaagaagtgtataaatatgaatacagtactgctcaacagaatagccgttatgttgatgattctggagagatattgagtaacagtgatggtggtgtttatagagaaaaaagcgaacaagagcgttggtctaaacaacctaaacgtaaggatcatgcttgggctccggtattttccgcaacagcttatatttctgataatgcacgtatctatacccgttatgccgaagcggtacgtatgccgagtatttttgaagatactgtcggtttctcctctggtctcattgataaacctacacgtgcctctaaacctgaacgtagtaaaaccgttgaggtgggttatgtgcatgatttaagtcagttattaggtgcagagcgtaatgcagacattaaattcgcttattataatacagttatagaaaatatctttgaccgtgacagtaactttgtatttactcagctagataaacagaaattatccggtttagaactacaggggcgttatgataacggtagtttctttacccattttggcctatcttataatcttaagaataaagtttgcgataaaaccgcatcgctgatgttagatccaagaaaccagtttggtgtccctgaatgtattgatggtggtttccccggtggttttttaaggacagctattccaccgcgttattctcttaatctgaatattggcggccggttattaaatgaaaatttagaaatcggcagtagagtattataccacagtagtgttgagaataaggatgaaaaatggttaatgaagaaaataccaggcgcttataaaggaataaataataacccgatgcgttggaattcggtcatgactgtagatgcttatattaattatcaggttacgccagatgtaatcattgaattatccggcactaacttaaccgatcgctattatttggacccgttaacacgttccatgatgccagcgcccggacggacgtttaagcttagtgtcaccagtcggttctga

SEQ ID NO: 10292 - DNA, 768 bp, Photorhabdus luminescens
atgatgaaaaatcgtatttatattggcttatttgcttccttactgttacacgcgggcattctcgtgtttatggcgtggcatttactgcgtgatgacagtgcgaataatcaatcagtgaattcgccaataatcagtatgtcagtagaaatggttgcttcggcagcaccggccggacaggagcaacctgtggacccggaacctattccgttaccgccagagatagcggtagcggaatcacctcatgaggcaaaaatagctctcaataagccagtggataggccacggaaacaagaactgcccaaaaaacaggcagatgctaaaccgaagaacaagtctcagccacagaaagagctggtggaagatcctcagccaaaattggcagagcaaacggaaggcagctctcaattagcagggagagatgctgtggattcacaagctggtgcccgtcaagcgacgaccagccaaccgatgattggcatgggggctgatgagttacaaaactatcagtccgccttgcgtcgtgaaattgaaaaacataaacgctatccgcgtcgggctaagaagatgaagcaacagggtatcgtacaggtcaggtttagcttgctggatagtggcgatttgacaaatcaccaattagtgcagagttcaggcgctgatgaattagaccgcgctgcccttgcggctatccaacaggctcggtcggtaggactgaaaccggccggtttgccaagggatctcactttagcaatagaatttaatttgaaataa

SEQ ID NO: 10293 - DNA, 462 bp, Photorhabdus luminescens
atgaatatgagaattcagcaagcgataaaggccgatttcaataaactgatcgaaatctgggaagcctcggtacgggcaacacatgactttttatctgacgaacatattaatcaattacgcccattgattctgcatacctatttaccgatgctgacggtttataaagcgataaatgataaacacgaaattgaaggttttattagcgttgatcagcatcgagttgaaatgttgtttatctctctagattcccgtggcaaaggcatcggcaagacattgctgaattttgctattagcaaattaggtatcaatgaacttgatgttaatgaacaaaatgttcaaggggtgggtttctatcagcacttgggatttgaagtttttaaccgctcagaaattgacggtcaaggtaatccatttccgttattacatatgcgaattgaacggccgaacaccgaagctacctaa

SEQ ID NO: 10294 - DNA, 1950 bp, Photorhabdus luminescens
atgaaaagggcatttatatttgcaccaggcatgttagcactttcgataagtgcaatttcgaacgcacacacttatgaccatctatatgtttttggtgatagcttgagtgatggaggaaataaaggtcgatatatgatcaatggtacaaccagtcagttgtataacgattttattgctcaatatttagggactaaactgacccattcccaaaatggggggactaattatgcagtgggtggagcgactgctgttcctgatttaaacaaagataacaatactcaaaatcaagtagataattatctggcaagccacggtggtcgtgctgatcctaatggcatgtatgttcactggattggtggtaatgatcttaaagctgtcatgttaggaggcgatccgaaaattgttagaaatagtgcgatgaacgcctcggcacaggtgcataaacttcttgatgcgggagctgggatcgtcattgtacctactgttcccgatctcggaaaaacacccatgattatgaaagccgtcgtctctcagggactcactaagctcccgatttctctcactcctgaccaggttgaggaattaaaggatatgatccgtgcgggcactaatgaatatccaaccataaatgaagatattcgctctcaagttatccaagggatctttgaaaagcttgcgactagggcttcaaagggagatgctaaaacagcggaagaatataagcgacaattacttgataagtataacgaaacaagcagaaaagcctcaggattggttgataagtacaatgaattagaagataccgcacttagcaagaagggcggcaatattgttagggttgatgttaatgcacttttacatgaagtcattgataatcctttacgttacggtttttccaataccttaggctatgcttgtgttcgggataaggaggctaattcttgtcgttctgatgataccggttttgatgccagtaaatcctttttgttctctgatgattttcatccgactccagccgcacagcgtatgattggtgagcagactatttcaatccttaatgctccacatcaggttatgtcactgacgaataccaataatgtgccggtgaagggggcgcttgcctctcttgacggccgtttgcaacagctacgcagcgtgggtaatgagcagagtaaaataggcgtattcggtggttatagtggaaatcacaacagtacattgacactgggtagtgactatcaactcacggataatattttgttaggcgggatgatctcgcgttatcaggataaacgctcagttaatcatttccgcgctgatggccgtggttatctattcaccacttatggcttatggcgttactacgataaaggttggattagcggcgatcttcactatttggacatgaaatatgaggatattacgcgcggtatcgtgctcaatgagtggctgcgcaaggagcatgcttcgactaccggtcatcagtggggaggacgcattaccgcgggttgggatattccgctgacatctacggtgatgaccagcccgattatccagtacgcttgggataagagttatgttaaaggttatcgtgaatcaggtaatagcagtacggctatgcatttcggtgatcaacgttacgactcacaggttggaacattaggctggcgttttgacaccaattttagtcgttttaacccctatgctgaagttcggtttaaccatcagttcggcgataagcgttatcagattagtagtgccattaactcaactgagacatctttcgtgagtaaaagccaaaagcaggacaccaactggcgtgaatacgttatcggtatgaatgctgctattacaaaagattggggcgcttttgcgtcaatatcacgcaatgatggtgatgttcagaatcacacttatgcgttcagcttaggtgttaatgccagtttctaa

SEQ ID NO: 10295 - DNA, 456 bp, Photorhabdus luminescens
atggaaaaattgcatcgttgggaaaaggatggatatgttgtcactacagataagaataaattagatattatgatcatacagcagtttttaacgaaatccatttgggcagaaggaatcgacaaggagacagttaagctgtcgatcgaaaatagcttgaactttggtctatataaaaatactcagcaaataggatttgctcgtatcgtgactgacttcacaacctttggttatcttagtgatgtttttattttagatggctatcgaggattgggattagggcgctggctaatgacatgttgcctggaacatccccaaatagcacaacttcgtcatattatgcttgtcacttcgatggcaccgtggctgtatgaaaaaatgggttattccccagtgaacgaagaaaactttgtttggcaaattgttcggccggatatttataaacaacccaagatatga

SEQ ID NO: 10296 - DNA, 276 bp, Photorhabdus luminescens
atggaaaatcggaaagattcgactcaaccttcccagacggatcaaatactcaatgtcatatccgaattatgtactattcggaaaatgcaagcggctcccccaccagaatcatggcctagtacgcgtgatgtagcggaacaatgcgatttcaccatctacaaagcacgttatctgttattgaaactggctaacaaaggattagttatggtaactccgtctcccattaagaattctctccgatggtatatatcggaagacaaaattaagtctatctaa

SEQ ID NO: 10297 - DNA, 405 bp, Photorhabdus luminescens
atgaaactgaataaaattataatagcggccatgttgatattgggtgttgtttctattgcatctatagcaaataaagctgatcgaagttatattacagtgacctttaatggtgctattattgctataccttattctaccgggcagggtctttttggtaaaagtgtaaattctggggaaatttccaacgtaatattgaaaagagcaagagcttcaattcataagagtcttgagaatcaattggtaaattgcagatcacaaccagtagttcatcagttattatcccgggcaacattgaaagtattactggctttaccgtgggtagctaataagacggataaatctccgaagttgtgccagcgaaagaagcttcatatattcagattaatgataaattttactttttaa

SEQ ID NO: 10298 - DNA, 486 bp, Photorhabdus luminescens
atgtttggaaaaaaagcagaggcagcggctgtcgagccggtatctcaatttgttgatgataaaaagaacgccggtgcagaagctcgtcgttgcacgattgttgccaagagctcggtatttaagggcgatattgatgtagaaggtgatatacaaatctggggcaaagtgattggcaatatccgggtgaaagagggggcgatccgcattatgcatgctggacgggtcgaaggtgaacttagcgcgccagaaatcattattgatggtgacgttgtggggacgtgctgtgcagcaacgttggatattcttgaacatggcgagctgcgtggaatcagtcgttgcagcagtatgtctatcaagcgcggaggcctgttttttgggcaatcggaacaggttgaaaacaaaacagcatccgaacgtgttgtaccaataaaagataccaataatgataaatctaaagataaggccgcggtaaaaacaagtgcctga

SEQ ID NO: 10299 - DNA, 531 bp, Photorhabdus luminescens
atggtgttggaaacagacaggttaattatgcgttcatggagagaagaggacagattaccattttatcatttgaatagtaactcagaagttatggaatattttcctgccactttgacgatggaacagagtaatactatggtggataggattatccaaagatttgagcagcagggtggttggggattatgggctgtagagctgaaagagaccggggattttattggttttgtcggtttgaatattcctgtggcggaattaccgttttcaccttgtatcgaaattggatggcgtcttgataagccattttggggtaaaggttacgctagtgaagccgcacgtaaagcattggattttgctttcacccaattaaaacttgaggaaatagttgcatttacgacaatttccaatttgcgatctcaaaaagttatgaagcggcttggcatggtgaaagatgaaaatactttcttgcatccttcattaccgaatgggcatccgcttcatgaacatgtgctttaccggattcgtcaataa

SEQ ID NO: 10300 - DNA, 483 bp, Photorhabdus luminescens
atgaaatatgaattagctgttatggcggccttgactaaactagatcatcctaatacccgttcaattgtagaagcgacagggatatctgaacgtaaggtgcaacaggttttgcaaatattgcaacaagacttagaggtaaagattaaccgtattagaaatgggaagatcagttattttgaagttatttcttggggaatatttgaaagtggtcaggcgattaactgtaaattgatcgatttggatctggctaaatttaaatattcccgtcagcaagaaaaagatattagaaaccaaaagaacagaaaaacaataatgacaacttatagtgaaaaaaaacattattttgaccgtgtaaaattaaaaaactatagagatagtatgcgtcttgaagggatgaatattgttatgaatagtttgcctgaaacatcgaaagagcaaaaaaatcttaaagataaactaattagaaaatatagtttacaatga

SEQ ID NO: 10301 - DNA, 585 bp, Photorhabdus luminescens
atggtagataaatatggaacagggcaagatccctatacatatccgggcatcgatacacttattaataaattagctattcgtgatcccgttattcttgagcaggcagaaagggaacttactgaacttgctatattgaatatttcattccagaaaccaccttacgatttagtcttttggcgtaaactccataaacagatattttctgatttatatgattgggctggtcagctaaggataattgatatatctaaaggggatacccgtttctgtcatgctaaatgtattgagatagaaggaaataggatatttgatatactagagaatgaaaattatcttgtaggattaaactatcaggaacttattaaaaaacttgctgaatattatgcggaattaaatgtaattcatccttttagagaaggaaatgggcgaacacagcgactattatttgaatatattgttataaactgtggatataaaatctcttttgagtctataaatgctaagcagtggattgaagctaatatttctgcttatcaatgtcactatcagccattaataaggatttttgaaaattgtgtctcttaa

SEQ ID NO: 10302 - DNA, 288 bp, Photorhabdus luminescens
atgattaatatcactgaaaatactgccttaaaagccgtaaacggttggtggaaatgtggcgataccggaataatttatcaatggggatataatccgaaaggaggtcctggacaaattacaataacgtatccaatcccgtttcctacagcgtgcttatctttgcaagttagcgtttattccaatgcgattcctgcggataactattcaacagtttatgaatttaattctaccagcgctgtaatcgggcgtgataacttaggttcgtattggtttgcaataggatattaa

SEQ ID NO: 10303 - DNA, 213 bp, Photorhabdus luminescens
ttgtcgtgtggaacttttggctctcatgtaactcacggttatgaatgcaaagcctacccctcaattcaatttgatatgcaaggcattaaggaaggctacctattttcaagcctgatagatcttcctttctcgataatcacagacatacttatatttccgagggatactcatcgtttatatactgatgaaatatgcaaaaaaccactctcttaa

SEQ ID NO: 10304 - DNA, 510 bp, Photorhabdus luminescens
atgtacacagacgttatttttcggatcttgataactggtatcggcgcgataatatgtatggacatctggacattaatacaaaggcgtctgctcggtattccatctcttgattatgctctagttggcagatggtttttatggatgcgaaaacaacgatttttccaccagactatagccaataggattgtctgctggcttgataagtttatttgtcccatttctgattatgcagccagcattcggattcggtctggctgcgtcaaaaactccgctccccatgaaatcacgagcaatgaacctattgactcacacttcttatggactagggctttatttcacagcaaaaattatgaacctggtaatatcatagcgatacctgacgtttttacattttttatgtgtataaaggacatttcagtggaaataataatagaatcaattatcaaccaccttattccgttaacgacctcaaaaaggattaacgggatcgtaaggagattaatactgtaa

SEQ ID NO: 10305 - DNA, 294 bp, Photorhabdus luminescens
atgaaagatcttgatattggtttggtctctcaacttgctggaatatctccttcagcattgcgattctatgagaaaaaggggctgatacgtccgatcggacgtgttggcctcagaagacaatacagtcctgatgttctgaataaactacaactgattgcgcttggtcgatctgcgggattcacgcttgacgatattgcagccatgtttgatgcaaacggggaaggaaaagtgaacatagacagggaacggttactgattaaggcgaggataaaaccattcgcaagctcagcttag

SEQ ID NO: 10306 - DNA, 1770 bp, Photorhabdus luminescens
ttggtggagctggcggcgggaaagcccgtggtgttggatgagtttgtttttgcttatgtgccggatttagatcccactcttgccatcaatcgcgatgagacattacccgcagaaagtcatattgtgcatcgtcaggctgtgaacaaaacagggttagcgagtgaaaacgcagtagcctatagtgtcacattgggaacggaagtcggtcattttgattttaactggattggcctgataaataaggcttctggcattattggcatgattacccatgccccagctcagaaaaaaattaagaccgcgaacggattacagggaaatgtactcacccgctctttcttgctggagtttgaaggggcagccaaagagaccgctattatgaccacggcggaaacctggcagattgattttaccgcccgtttatctggcatcgatgaaatgcagcgtctgatgaataccgacagttacggtgaggcggcgtttttcggtgatgggttttccgtggtttgtcgtggtgaccggtacacggtcaaaaaggggctggcttatattggcgggttgcggggtgagttggcgtttgaccaaacacttaaccgcctgcgcgatacccgcgtttatgcggattttagctatcaaggcaatgtggtcagccagtggaaaaccgtcgttcatatcatcgccgccaatgatcttaaaaactacatcgatgcggcagggtatccgcattatgtctttgcggttgcgggtattgatggtcacggtgatgtgatggatttgcgcattaaggggtcattaaatgaccgtgatatttccgccattcatcaagagattgatagcgtgaaacgggaatatgtgactcagcaggcattggaaagcggcctgcatgggaaacagccgaaagggggctatgccactaatgcagcattaaccgttgttagtgaaaacgccgatagtcgcctggctaaaaaccagaacggcgcagatattcccaataaaaatgaatttgtcaaaaacatcggcttagtggaaaccgtcgaacgggtaatgaatgctgtaccgaatgacaggagaattaacgggaaatcgctatcggctgatatcagtttgatggcgggtgatgttggtgcctatcaccagactacctatatgactgagctacccggcaggcattattcagggccattttcttgtggtcgggaaaatggatgggccaaaggggtgagtatcggtgtagggggtgacacggggcaaatttggattgatgccgatgcacagttgcacaccagatttctcaatgctaacggtgccgtagagcaaaagattacgataggtatcccgattggcgccactatcgaatggcatacggctgcgccgatacccgccggatatgaacccaatgaggggcgctcattccgggcggcagattaccctgaactcgccaaaatttttcccgacctgaaattacccgatgacagggggctgtttaagcgtggtctggatagagggcgggggctggactcgggtcgttcgctagggagtgttcagggggacgcgatcagaaatatcacgagatcattaggtaatcccactattgagagcgggagcaacgcatctggtgcattcagctaccagtataaggcaggcggtcgcgcagccggtgccggtggtggggtgatttcatggacatttgacgcgtccagagtggttccgaccgcaaatgaaaaccggcctgtcaacaaatcagtgatttatattacgagggtaaagtaa

SEQ ID NO: 10307 - DNA, 777 bp, Photorhabdus luminescens
atgactaaatacagtgcagatattcaaatggcccggtttgatgaggatgggttagctattgttagcggatgggttgcggtttatcgttgtcatcctgaaacacgggaatatattggggccgatatggatagcgtgtcccgcggtttttctgttgcggctaatgcgtatctggatgcgcccgaattacctgacacgcatgatgttgcgatttgtcgtcgtgtagatgaaaaatcctggcgacatgtgcctgactatcggggtaaaacggcgtatgcaaccgatacaggccagccgatcaatattaccgccatcggcgcattgcctgataatctcaccctgcaatcaccccaaaccccctttgataagagggagaataagcaatgggtcacagataaatcagccctaaaatctcatcaaactgaacaggctgaacagcaaaaaatcgcgcgacagcagcaggcagatgcggcaattaaacccttacaggatgccattgatctggatatcgccacggatgccgaaaaatcagcgctcgtggaatggaaaaaatatcgtgtgcgggtgaacagagtggacctttctacggccccgatatcaactggcctgagcaacccgcgtgatgaattggcaacggaaaataatgcgcatctctccgaatatgacggggatgcattgcgcgatgttgtccgtccatccgttcgtatacggtatcgggcagaaagcggacagcggtcactacctgagtccggcaaacgccatcaattatctggcaaataa

SEQ ID NO: 10308 - DNA, 609 bp, Photorhabdus luminescens
ctgagtccggcaaacgccatcaattatctggcaaataaaatccggggaacgggaaacatgagcgctgtggtactcatgatctgcgcgaagacgcataatgaatttatccagcatttaaccccattttcggcggtgttgccgttgtcggtattttctcaggtcactcgtatggcaaagacagcggaacgtctggcgatcaccaaaatgcaattgcctgggaaaccggacagcggtttgcctccatttcaaccgttttcaacatcaaccagccgcatggccgtgaatgcgcgattgattgcacaggctaaaacacaggttagcgccggcagcagcattgcgggattgaaatcacaattaacaaacttcacgacggtaagacagaacaccttacaacaagtgactgccgctctgaatggcgtcaggaacaaatcggcccgtgtctgggctttttcagggaaagggaatggcgcattactggccgaaaaactgcgtcaggatatccctgaacaggatgccgtttacacgctggcgacattatttgccggggacgatattcgcgcattagaaaggatgctacacaatgagccaaattatcacactggcccttga

SEQ ID NO: 10309 - DNA, 519 bp, Photorhabdus luminescens; identical to SEQ ID NO: 9754

SEQ ID NO: 10310 - DNA, 1500 bp, Photorhabdus luminescens
atgacaccgattaaccggctctatctttccggtgatgaaattcacctggttgacgccaatattatgctggagctggcatcctgtggtcgtggctttatcacggcggagacgacaacggactacaccggaaaactggtacggctggacgtgggttacacggatttggtattacgctggtttacgggttatgtggcacgctcacagccagcccaaaacggttatcagcgtctttttgtgcgtgaactggttggtgtgtttgaccgattatggtcgtgttcatttcagcatccaacactgagccagattgtggactggttgcaggagcacagcggactgaccttcatattgccggatgccccttatacggagacacccatcccgcattttactcatcatgggaccggctatcagttgctggctaatcttgggcaggttttttcgattgaggattatctctggcatcagttgccggagggttcggtttatgtgggcagcggggcgcattcgatgtttgcggggaaaccggtagagatccccaatgcatttagccagtgccagtccgcaggcaatgcgatgaccattcccatgatcccatcgttgcgtccaggtgtagtgatcaatcagtaccggttgaacaaggtcaatctgaacaatgaaaacatggtcattacatgggaagccgtcaacaaactgaccggtcagtcgcagaccaaaacgccaatgcagcgtcagattgatgccgcctaccccgaattatcggcagggctgcatttacccaaatttgcccgcattgaggcacaccctgaaaatacggtcagcggcgatatctccgactcattccggccacgctatgcggttgatgtgcaattattggctgatgatggtcaggatgccgcggttcctgtttatcatgctgtcccgctgcctttgccgatggcgggcagtgaatccggtatgtttcaatatccgccagtcggaacggtggttgaaatcgcctttgaggcaggcagaccggataagccctttatccggcagacattaagccagggcaataccttgcccgatatcaagccaggcgaacaattgcagcaacagcgggcggaagtttctcagagggtaactcaggaaggaaactggattcgtcagactgaccagaccattaatgaatcgtctatgcaccgtgaagtcagggcagacacggaaacacgtaacgtagtcgcacgggaaaccacgatacaggccacggataaaaccacggttttgggcacgtctacgctattggcgggcgctgtccggcaaattgcagacggtgactatagtatggcgacctcatcaaatttcgttgccagcgtagggaaagaggccagtatcgaaatcggacaaaagctgatagagaagattggtctgcttaagcagagcatcgccggtgccaggcaagaaatcatcgcgcccgtggtttgggtgggcagccagcaaatcaatgtcatgaccttgatttag

SEQ ID NO: 10311 - DNA, 192 bp, Photorhabdus luminescens
ttgggtgggcagccagcaaatcaatgtcatgaccttgatttagagacgttggatgtggttaaagcactggcggaacagactgccgcccatacgcaccacaacacaggtgcgccggagaacgccagcgtgataaggaacacgggctataaatccgatggattgaaacagaagtattcgcctgtgattggctag

SEQ ID NO: 10312 - DNA, 174 bp, Photorhabdus luminescens
gtgaagcaaagcgagtttagacggtggctggaagctcaaggcgtcgaagtttcaaatgggacaaaccatctgaaactgagataccaggggaaacgaagcattatgccgagacaccctagccaagagatcaaagagccgctgaggaaagcaatcattaagcaattaggattgtga

SEQ ID NO: 10313 - DNA, 468 bp, Photorhabdus luminescens
gtgataaaaacccgcctcgcaaggggcgggttctcgcacaggttcatcattaaaaatatgcgatatccagtcacactagagccagtagaagagggcggttatttcgtctcattcccggatatccccgaagctttaacccagggggatacacgggaagaggcgctagagatggcactcgatgcgctaataaccgcttttgaattttacttcgaagataatgaaaaaatcccgcttcctggccccgtagggcaggattatgttgatgtgcccttaagcgtggcctctaaggtgcttatgctcaatgcgtttcttgattccaagttaacgcaaattgaattagccaaccgtatgggggtgaaaaagcaggaagtgacccgtatctttgatttacggcactcaactaaaattgatacggtgggtaaggtcgcatcggctatcggacatcagttaactttgtccattgaatga

SEQ ID NO: 10314 - DNA, 270 bp, Photorhabdus luminescens
atgaaaaaagactggcataccgccgatattatcgctgcgatacgtaagaagaataaaatgctggcatcattatccagagagcacggtttaagctcttcaacattagcaaatgctttaacgcgcccctggcctaaaggggaattactgattgctcaggaaattggtgtcacccctgctgaaatatggcccagtcggtattttgacgaaaataagcagcctatcaaacgaactgtccgaaatgatttaccaaacaattctgatatcacataa

SEQ ID NO: 10315 - DNA, 231 bp, Photorhabdus luminescens
ttgagtcaaataatacaatcggttaaagtagtgttgtcattggcaaaatccagtgaccaaggttttgcagccttgcgttcatggacgctggtaagaagtttttaccaatgtgcctgctatcgcccctctatggcggttcaggcaggggaggttaacacctcgccggaaatgaacgccggtctgcaaaccctgtttgaatcgccaccaccaaagagggaagcaggaatatga

SEQ ID NO: 10316 - DNA, 252 bp, Photorhabdus luminescens
ttgtctcgttgcacttatgacgaaataaatgaacttatgatgaaaacggcactacaccgcacccgcctgcacgttttggatcaaaaaattttttcaattttaaaatcctacaaggcaaactgccaaaccgcgccaatactggcggagtgggagaaatcacaaactgaaatgattgaaaagattttcaggaaatttcagtttttggatcaaaagaggatcacggaaaaatcccaatgcattgatattaaatga

SEQ ID NO: 10317 - DNA, 1059 bp, Photorhabdus luminescens
ctggaagtgacgcccaaaaatattaaatatgccgagcgtaaactcggcgaaatatacaataaaattgaacgggatatttttatttatgctgaatttttccctaattcatcacgtctaaaaatattcggaaatgtcaataaaggtagaacaataaaagattatttagatgaatatttaaaaatctgtgaaaccagaaatttatcaccatccacaattaatggatataaaaaatgtaaaactgctctatctgaattacataaaattcccgttgtagagttaacaccagcaatattaaaaacttggattcaaaaacgatcaactgctctgaaaacgatcaggaacaatctatcatttttacgaagcgccatagatgaagcagttactgattgcctgattagtatgaatcctgtgaatttagtcacagcatcacggtatcaaactgaacgaatagaaaatgatagcgaatatattgttgaccccctatctcctaacgaggttactgcattactgtcagcagcaggcaataaacaaaaacaatgggaaaatttattcctttttgcgatacatacaggacttagaagctccgagttatgcgcgcttcggtggcaagatatcgactttattggcaaaaccgcacatgtccagtcggcaaaagttgtgggaataataaaaggaacgaagacaaaagccggtaccagaaaagtcgaactgaacactgacgctatgtcggccctattaaatcagaaggcattcactttcatgaaaggcaacgtgatatttgaagatcctaaaacaggcgaggcttgggcaggtgcagatgcaattcgtaaaaaagcctgggtacctacactgagaaaggctggaattcggtatcgcaacccatatcagacaaggcacacatttgcaacaaaacacattagccagggagttaatcttttctggcttgccgctcaaatgggacataaaggcccagagatgcttttcagacattatggatcatatctgaaagactatgacggcagcacatacaaacccaagcaggtcagtggtgggacatga

SEQ ID NO: 10318 - DNA, 216 bp, Photorhabdus luminescens
atggtaaatattgaatgtgttcccatatccgcttattgctatgcaacaggggaaacagttgactcaattaataaacgcattcagcgcggtgtttggcttgatggcgtacatgtactgaaagttgaaggtgttaaggaacgctggattgatttaaatgaggtagctaagtgggccaggaaaaacagcgtagtaaattgcccagaggaattacagtaa

SEQ ID NO: 10319 - DNA, 171 bp, Photorhabdus luminescens
atgcaaccctggcaaccaggacaacagttattaaccaacttcgatatcaaattgggaagattagcagccagtgtcaaaaatacatcttgcaatcaaggtgatattacccgtgtttgtgctgccgttgatctgatcattatatcaatgatgaggcaaaaccatgtgaggtaa

SEQ ID NO: 10320 - DNA, 102 bp, Photorhabdus luminescens
ttgagaattggatactggaactattttaacgtcaaacgggaaatcgtagagtacattacaacttctattgataataatgattccattgcgaccatcaggtag

SEQ ID NO: 10321 - DNA, 189 bp, Photorhabdus luminescens
atggctgcacgattagaaatcattatctcatttgatgaaaacctaaataaataccaagtagaatggataacaggagaaagtcaagatattacagatgaagaaaagaaaatcattgctcaattaaaaaataaattactggcctcaatggaaaatgaattaactggaaataatcaacattacctccattag

SEQ ID NO: 10322 - DNA, 498 bp, Photorhabdus luminescens
atgaccacaaccgcaattgcattagcagcagattatgaaaaattacaacagttggtagaaaccggcgagttctcgccagaagatatcgccgatacacttgaaagtatcgaatgtactatcggtgataaacttgacgctatcatgatccatgttcgcaatatagaaggccaagccaagattcttgcggatgagtctaagcgactcactgaccgtaaaaaatcattcgaaaggcaagtaaaaaacctaaaaaagtatgcgctggactgtttactgaaagccggcatggattcactacgaactaccagaaacacgttcacagccagaaaaggtattatgaatgtcatcattgatgatgagtcaaaattacctgatgagttagttgatgtgcagacaattaccgccccggacaaaaaagccatcaaagaagctattgaaaacggtatcaatgtaccgggagctcatattgaaatcggccagagaagcctgcaagtacgttaa

SEQ ID NO: 10323 - DNA, 1761 bp, Photorhabdus luminescens
atgttcacatatatctgtgtctttgagccgacaaaaaaagctcaaaaaaatggagccgtaccacttgcaattgcactcgaagccaattccgaaaaaatggctaaagctatggccattgtttaccttggggaagagtacgcggacgatatgagcaacttcaacacatcaaaaccgattatttgtaaagatatacaaggcttccctcgcccaccaattggtaaatttgatgaaaaatttgctactgaatacgagttcaacggcaccacatggcaggctagaacgctcgaaccaaagaaaaacccatctattactacacgtgattttaatcacacttacgccacgttagatctggaaattgcactggcattactagacggtgactttcattgctgggcgattatgtcacacagtatgaaagaagctaagcaactgataacaaataacaatgaagcatggcggcagtggtctaccgcatttcgtatcagaaccgacgctctgtccattccacgggaaacgcttttcagagtcgtacgtgaaggtaaacaccaccctgaatttctgaccgatgccgtcgctattaaggaattcttaaactgtactttaagtgataccgacatacccgttgaattaccagaagagaaacccaaggtttccaattattcggtgtcaacatcagaagcctcaataacagatgtcactccagatgaagttgaaacccaacaggcagcgctacaggttaaggagaaaaaaagcgaagccaagtctctcaagaccagaaaaaccaagcaaaccaaagaggacaaagcagtagaagagactgcacaagacaacactacggcggatgatgaagtcacctcattgcctcctgtcgccaccctgagcaccaatgatgataacttccaacatcgggccaatttgctggaagaaactatcaaggcacaaggcaatgaacagcaaactaatctccgtatctggaaggctgtccaacgtaccgatccccactttacaaaaccattggagggaatggggttcaatggtacaagcataaacagtaactatatgtttatgcgggcaacagaactattcggaccattcggttatggatggggctgtaatgtcacagaagaaaaactgatcaatggtgcacccatgtcagaacctatctatgacgacaaaaataaacaaattgggagccgattcttacgtgattctgacggcacattaatatgtgaacaaaatcactctatcaaaattctcttttggtatctggttgaatgtgacatttgtgctgaaattgaaagttatggtgcgacaccatacatgtacagaaccaaatatggaattaaaacagatggagaggccatcaagaaatcactcaccgatgctataaagaaagcgttatcgatgcttggattttctgctgatgtatttatgggtatgcatgacaaccctgaatatctggctgacaataatattgaatttgaaatcaaggccgccagtgataaggccgaggatctagtcagattacgcaaggaactagacgataagttcacccgtaatacagaaactatgcgcaccgctgtcagcaaaaatgaaattcgcggcatagcatctacccttatccgtgaattaagcattcatttaggcaattccaaggccaaaggagacaaggattatgaaaagtacttatctggtcgtctgcgtcgcttgaatgaaatagagaaagaatgtttaacccaattagaagaggcaaaccaatga

SEQ ID NO: 10324 - DNA, 159 bp, Photorhabdus luminescens
ttgggtatatctattatcggtggcaaaaggcgagttgaatattacccaacgacaggaatggtttattcaaatgctgtcaaggaattatatccaaaagtcaaaatgccaaaagccgggattaaggcagcaataagattggcaaaaaaagcaatttattaa

SEQ ID NO: 10325 - DNA, 1026 bp, Photorhabdus luminescens
atgaaaatattcattaccgatgaacaaaaagccgaacttgaacatctccatcacacctgccgtgataagagggagtgtgatcgcatcaaagcggtcctgctggcctctgaaggctggagttcagtgatgatcgctcaggccctgcgtcttcatgaaatgaccgttaaccgtcatatcagcgattaccttaatcaaggtaaacttaaatctgataatggggggtctgatagtttgctttctcaagaacaaactgattttttaatcaatcacttatctcaacatcttttccatcacacccatgaaatcgtggcctatgttgctcagctctggaatattacctttagcattcccggcatgaataaatggctacaccgtcagggtttttcttataaaaaaccttgtggcgtccctcataaattcgacgcagaaaaacagcgacaatttattgaatattatgagaatcttaaagtcacagcgaaagacgaacccatcctttttcttgatgctgttcacccgactcaaggcaccaaactcggttatggctggatgcgaaaaggcgagaaaaaaacagtcaaaacaacaggaagccggactcgcctgaatatattgggcgcgctcaacctgaatgccattggtcgtacggtgttccaggaatatcaaaccatcaatgactacaacatttgctgttttttcaatgaaataagaaagtcttatcctgactatcatcaaaaaattcatcttattgtggatggggcgggttacaacaaagctcatcttgttaaggagtgggcttatgttagcaatattgagttacattaccttcctccctatagcccaaatttaaacccaatagagcgattatggaaggtcatgaatgaacaggttcgaaataaccgttattttgcggataaacatgaatttcgagacaacgtcttcaaatttttcaccacaacgctaccggatatagcggactcgctgatgtctagaattaacgaccattttcaggtgctaaaaactgcatcttga

SEQ ID NO: 10326 - DNA, 345 bp, Photorhabdus luminescens
atgaaagcacaacaagaaacaatacaagtaaagctctatgttcacgctatcgaaaataatatttcacgaaaaatgaacatcacagtcttaccacatgacgcaagtaaacacggaaatgcatcgatctttggtacagttgtcgctattcatgatatagaaatcccatatccaaatattagtcgtccagactttataaactcacaaattgatactctaaagaaagaacaaaataaagttcttgcggaagctcatgctaaagcctctgaacttgagggccatattcaatcattgttatgcattgaagaaaaaccaatgtctaaatctgatgaaaaaatacctgattaa

SEQ ID NO: 10327 - DNA, 306 bp, Photorhabdus luminescens
ttgatcaacgataaataccattcagaggttatggttttaataaatgtttcaaacagaccgatgaattggcctaatttgatattctgcatatcattacacataagaactgttgttcgattggttaatgtgcgggtctttccccgccgtccgttgattcacgcagtttctaagaaacccggcaagaagaaccgtaacgcatcaactgccagtgtttttgtaccattcccaccgctggctggggaatcctggtgttggttgatctttcctgttccactttctggtaaatacagttgttatatgtggtaa

SEQ ID NO: 10328 - DNA, 372 bp, Photorhabdus luminescens
atgagcatgaagaacatcaggcaacaacgcctaagagattggttttccgataaaactcttcctgaaaaagagaagagttatttgtcacagcttatgaatggtaaagcatctttcggcgaaaaagccgcgagacgtttagaacaagactatcgaatgccagatggttatttagacgccgatacaaacacccaccaattaggaaatccactacaagtaacattgactcctaagcaaaaagttcttctagagctattcgacgaactgccagatagtgatgccgatgatctaataaaaaatcttgaagataaaaaacggcattatgataatttactagaagaattattacataaaaagaggcaaaagaaagcatag

SEQ ID NO: 10329 - DNA, 285 bp, Photorhabdus luminescens
atgcttgacaaatgtttagtatttattaaactttctgtatttctaaaaggggtagttatgaaactaaatgattacatttctaatttaaagcgaggtgaagccaaacttcttgctgagaagcttggggtatccagttcctatttatcgcaaatggcacatggttatgctccagttcctcccgccagatgttttgatatagaaaatgcaaccaatggaaaagtgacaagacaagatcttcgtccccatgactggcagaaaatatggcctgaaataaatgctaactga

SEQ ID NO: 10330 - DNA, 450 bp, Photorhabdus luminescens
gtggaacaaaacatcaacgccctgaaagccgaagttgaggcgtgggcggcagagaaggggcaggagtatgtagcaatcgaaataagccgaatgtacttcttgctttgtgaaagaacggtatcagccaagttgcatcccattgaaataaatgggaatgctaattggaaagctatcaataacaacaggcagcaaattttcaggtggttgcgcagtgattcaagggctgcacgaagaaaagtatcagagttgttacccgctatccaatcagcccttccacttgaacgcaaagccagaattaacggtgaaacaactaattatttgatatctgttgcgattcgtgaatttacggcggtgataattgcaatcctattgggaggtttaggaggtagtgacgtatcacaacaaataaccgttgcgatatcagcactgaatgctttgacaaacgtttaa

SEQ ID NO: 10331 - DNA, 225 bp, Photorhabdus luminescens
atgcttaaaaccatagaaaagatcacctattgtaataagtttcgtctgaatggtgagcttgtaactatagaacaaatctcagaaatttatgaaggatgtagagaagctgagttaaatatctgggaacagtatgaacggcaaaaggccaaattgctggaggagtctcttacctttgaacggtgtaagtcagtttgccgtcagattgctaaaatacttggagcttga

SEQ ID NO: 10332 - DNA, 753 bp, Photorhabdus luminescens
atgagtatgtcattgatggtaaaagctatgagtatcaaagttggtaatcctcttcgtaaattggtactgattaagttggctgataacgctaatgaccagggagagtgctggccgtcagttgcttacattgctgaacaatgcgaaatatcagaacgttctgttcaaaatcacattaagcaattggtaaaagatggcattgtctgtgttgcagaacggaagacacaaaatggactgaatcaatcaaatgtctatttcctgaatctggataaatccagtcatggctatagtgaaaatgttgcaccatatggtgcatctcttgcacccagtggtgcaaattctgcgggggttagtggtgcaggagatgcacccagaaccagtcacccttttgaaccagtcacggaacctaaaaccccccttaccccccgtaaggggaaacgggagaaattaaaattcgatcccatcacggcaaagcctaaaaacgttagcgatgaagtatgggctgattgggtcacttttcggctagaaattaaaaagccgctgacagaaaccatgtgtaagcagcaagagaaaaaactagcagattgcacgaatcctgattcagtgatttgcacgtcaattgcgaatgggtggcaagggttgtttcctgaaaagtctcaaaacatcaaacctaaatttactcaaaatacgcatacaagctatgagggtataacctacgaaccacaggattcttattggtcagaaaatattgattag

SEQ ID NO: 10333 - DNA, 585 bp, Photorhabdus luminescens
atgaactctaatagcttacttgacagtatcaacattgccccacgttttgaacatgccagctttgaaaattatcagcctataaacaaagctgctcaacataatctgaagatctgccaaagttatgttcagacttggaaagaacgcaaagttgcgggtgaggggatcatcatgtgtggccgtcttggtaccgggaaaactcatctggctgttgcgacatgccgtgaaatagtcactcagaacggtatcagtgcgtttattacaaccgcatcacgtattatcagggcatttcgtcgttcatggagtaatgatgctgacaccaacgagttcgagacactgaggttttacagtgagttggatttgctgatcatcgatgagattggcgttcaatacggcactgaatcagagcgaaatatcttgtttgaggtgattaataaccgatatgaagatttattaccaacgatcctgatcagtaatttgccaatgaatgacctgccggtgtttttaggggaccgagtattagatcgtgtgttacagggtggggtagtgttggcttttgactgggatagttaccggagggggcagtag

SEQ ID NO: 10334 - DNA, 1368 bp, Photorhabdus luminescens
atgaatgagctcaatctagagtctgcggttataagcggattgttgtcaggtggtgcaacgcaggatgcttatgatgtttttgcaacgttgtcagaagaggcgtttagttcaagttttttgcgtcgtgtctacgttgaaatcaaaaaacaagcgttcagtagttccctgattgatccgatattcatcgctgaggctatgagtgaagatggtaatacattagctaatatcctggagttgagtaagagtcctgtttggaatgcaaacctgaaaggctatgccaataaagttagtgaatattggtatgttcggcgggttacagcagtgatcaacgctggccaacaggcgttactggaaactaaaaatcatactcaagcacagcatgtcataacgggctttatgtccactatgggggagctaatacgagatactggcaacctggctcccgtgcacatcaagacattgattgaagggtacattgacatactggggaggcgtaacttaggtgaggatagtcgcgggatgattatgacaggtattgagccatttgactcgttgacagggggatttaacccaactgatttaattctcatcggtggtcgtcccggcatgggcaaaacagaactggcactttgcatgattgagggtatgactaggaatggaggggcggtattgctgttttcaatggaaatggcagcacaacaaattacagaacgtatagttgctggttctgcccagttgtcagtttcgaaattgagacgtggtgaattttatgatgaagattgggctcgtatatctaacgcaataagcgagttaatagatcgcgatattcatattcttgatgctagtgaattaagcgctgaacagatatgtgctatcagtgaaacgcataagcgcaggtacccgaatctgaaaggtatttttgttgattatcttgggttgatagaaaggcccaaagccgagcgtaatgaccttgctatcgctcaaatatccagggccctcaagggactagctaagcgattgcatacacctgttacagcattgagtcagttatcaagagacgttgataaacggcctatacatcagcgtcgccctgttgcagcggatttacgagactcaggtagcctagagcaagatgcagatcgaattatttttacttatcgtgatgttgtttataacccactaagtccagccagaaattatgccgagattattttggataagaatcgtcacggtgaaaccggaacgatattccaggaatttaaaaacgggcattacttaccaactgatcaaattgttgctgctgaaatatgtcgtacacagcaacaggctaaacaaaaagagcgccgatacgcagacaaagcattttaa

SEQ ID NO: 10335 - DNA, 468 bp, Photorhabdus luminescens
ttgagggaggccgcaagtcgctctggttatctttgttacgatgctgatacatccccgaaaggggagcattacattattatcgattcagaaggtgttaaaattagccgtattgggttaaatcacgatgagcgccatataagaggtgctaaacatcgttcattgatagcccaattgaatgaaaaatttgaaggctatactccagatctttttagagaagaagatagtaaacatcataatgacattgatacgttaggtgtgttgttaataaatattaatccaccatatcatgaatctcaggccagcatgatggatttaaggattgtggttccttttaccaatatgaaaggttttcactataataaatctgtaacggagcttttagccctctatactggagagaagaagatagtcattcctgatatggttttacctaagctcaagaagcgcctgaaggatcaggaaaaatag

SEQ ID NO: 10336 - DNA, 1200 bp, Photorhabdus luminescens
atgagagtgggaatttctggtttccaatctgaaaggttgacacagataagagaagcgaggggattatcgaaaattaaccttggtaggttagtagatcgttcgccatcaactattaccaaatgggaaaacggtaatcattcccccgatgcagaagtattgcatagcttaagtcagattcttaattgcccggtaagttggttcacaaagcctattgttaagtacgaaaaaaaaccagtattcttccgaacactttcaaccacggcaaaagacttatgtatcgcctcagagcgatacatggggtggtttcaagagttatcatgtaagatgcaagaatatcttgattatccagaggttaacattcctcatcttaacgtaaaggattacagagcgatagatgatcaattgattgaaagaatggcttttgagtgtaggaaagcttggggattaggtattgcaccgatagatgatctattactggtaatggagaatgcggggatagtctgttccagatttgaacaaggtagttctgtaatggatggctattctcaatggaatgatttagagaatagaccgtatgtggttttagctagtgataaagataactattatcgtagtcgatttgatgctgctcatgaattaggtcatatagtcttacatcgatatataaataaatttgataatatcaattttaatccaatagaagagcaagcacataagtttgcgtcgagtttcatgctgccggaagagtcattttctgtagagcttcctccatatcctacattgcagaatttcatatctctaaaaaatcgctgggggatgtcggcacaatttatgatccttagagcgagaaatttagaattaatatcttctctggaatatcagaggttatataaaaatatttctgctagaggttggcgaaaaggagagccgcttgatgatcttagaaaaccagagtcggttcgtttgttacctaggtgcttaaatctattattggattctagaacttttagtaaaaaaacacttcttgaggaatttggtttcccaaaaggagatttagaggatttatgttcagttcctaagggattcttgtcagaatcacaggtacttgatttccaatccagaatacaattgaagaatagtattaatatatctactacacaacaagatacaaacgtcgtcaatttatttaatagaaagtaa

SEQ ID NO: 10337 - DNA, 594 bp, Photorhabdus luminescens
atgacgcagcatagttttatcaaaatttcgaatgacaccctgagacctgcgactcccgcagccagggaatacctgcactccaaagtgaagtggggcgatgtgctctatgcggattttaagaaagcacgtaacccacgtttccatcgtaaatattttgcccttctgaatctcggctatgaatactgggaacctgctgggggtaccatttccccggaagagaaagcgcttgtgcgtggctacgtacaatttcttgcacacttcgcgggcagtgaagatgtcttacaatccgctgcggatgaatatcttgctggcatatctaaaaaccgagcccagaatattactgccaccaaatcctttgatgcctttcggcgctgggcaacagtggaatcagggcactatgacatttacgaaatgcccaacggcagtctgtaccgtgaacctcgttcagtcagtttcgccaaaatggaagagatggaatttcaggagctttataaagatacattaaacgtgctttggaactttattttgtatcgcaatttcccgacccgaaacgccgctgaacatgcagcttctcagttgtccgattttatgtaa

SEQ ID NO: 10338 - DNA, 261 bp, Photorhabdus luminescens
atggctaaaagtgaaaaacagtggctttctaatgtgacattactgggatgtatctgttgtcggaatatggggttgggagtaatacttgcggaaattcatcatgtgggagcggtacaagatatggcccaaagggctgctcatttctccattctgctgcatcctcgctatcatcgagcgtttgcatcccacgggctttcatgcggcaccgaagacatggcaagcaatccacagtatggcaacggaactattgccccaagttaa

SEQ ID NO: 10339 - DNA, 159 bp, Photorhabdus luminescens
atgtcgggtgtgatattttcaacggatgggctgcaattgactcaggcacaagaaatttggttgcaggactggttatccaagttcggtgcatgggtgtattctggcaggcttgataaacgtcagagcagtatgattgctgagcttatggcgacggtatag

SEQ ID NO: 10340 - DNA, 312 bp, Photorhabdus luminescens
atgttaatcgctagggtagtagaccatatttaccacattgatcgggttgcatttgggatgttgcttagtcgatatgtttattgtgtatctgatagagcaattgccaaacattatcatgcaacggttcagccaagaattatgatccgcagaaatggtatgttgcgtaagcgaaagccatcaatgtcaacttgtcggcgtgaggttgaggaaatattaagagcaacggaatatttgatttatcaaccattgcaagatgcctttataagacgggaacaggaaagaaaatcaagacttttgtcacgaacgtgttga

SEQ ID NO: 10341 - DNA, 201 bp, Photorhabdus luminescens
atgctaaaacatgaagatatgacaacaacagcctcatgtgttttagaaacagtaccaatgtatgactgggtttctattcccgatgtttcaactctgacggggctatcaacaccgcgttgccaattacttttaactcaattttgtctggctggcttgatggaaagccgggacaacgacacctttttcaagcgttgcctttga

SEQ ID NO: 10342 - DNA, 474 bp, Photorhabdus luminescens
atggaaaatattgtgaatttaagtggtatcacattaattaatgacgactctctacgatttatcaaaacgttaccagacaactgcatagacttaatcgccaccgatcccccctattttcgggtaaaagagtgtggttgggacagacaatgggaggatgtaacggcttatcttgcgtggctggatgaagtactgactgaattctggcgtgtgctgaaacccaacggcagtttgtatatattttgtggttcgcgtttggcgtctgatacggaaatccttgttcgtgaacggttcaatgtgcttaaccacattatctgggcaaaaccttctggtccgtggcgcaggcagaataaagaaagtttaagggcttatttcccttctactgaacggatcatatttgctgaacattatcaggggccttatcaacctaaaggtgatgggtatttccacaaatgccgcgaacttaagcaatattga

SEQ ID NO: 10343 - DNA, 369 bp, Photorhabdus luminescens
atgaatggtgtgaataactttcgtagcaaaggtcctgagttgctagtcgaactggcacagcatacagcttgcacggtcagtgaaataatccatgttgagcctgcgttagccgaacaaattggtgaagctgttgcgaaccatatgatgcaggtttggggcggtcagaatgtctattttcctatgggcatggtttggaaagtcagcctccgtgatcgtgagattttcaacgaatttaacggtaaaaatcatcatgacctggctcgtaagtttggtgtttctattcaatggatttacagcgtagtgaaacgtattcgaaaggaggaactggatcgcctgcaaggtaagttattcgataacgagtctgaatag

SEQ ID NO: 10344 - DNA, 360 bp, Photorhabdus luminescens
atgttactttcagaaaccggaaaagcctctacgcgggaaatggatatcccgcagttaactcgcgttttggaagctatgaaaaagcgcggttttaaaattcaatcctttaggaaatccaaaaaatcacgtccattagatagtcatccccaatcaaagaagatacgtgcattgtggctggaaatggcatctataggtattgttcgtaatggttctgaacaagccttagctcactggattaagcgtgaaacgaatattgatggtttacagtggttagattcagaccaagccagcagcattattgaaaaactgaagaagtggcagaaccgtgtcacgaggaaaaagtatgaatggtgtgaataa

SEQ ID NO: 10345 - DNA, 192 bp, Photorhabdus luminescens
atgaaaataacatgtaatcactgcaaacaacctgttgaaaaaatgaatctaaaacaagccaatgttatccaaactcctgaatttggtgagtgggttgtcgatttaatcttagtttgtccacattgtagtcagcaatacggtgtatctgtggcaacatgggatttacagccactggagaccactcatggataa

SEQ ID NO: 10346 - DNA, 1089 bp, Photorhabdus luminescens
ttggctcaaattgttaatcacaatatatggccacgacagaacgcagatgcaattcgtcagcgtattactgatttcttggcaaaaagaggtatcgataccgcaaaaagttttgaggtggtacaaacaaccaataaatcagatatctataccgataataaaaatacaaccctcatttctgaggaggaaaacatgttactaaaaaaacaagtgttatttccagctacgaaaaagcactttggtttatttcgtgatccatttgaagatagtgcaattcaaagtgctgaagatgtttttgtgactccagatagccgttatgtacgggaagccatgtatcaaacagcccgctatggtggttttctggcagtatcaggggaatcgggttcaggtaaaacgacactgcgtcgtgatcttattgaccgtattaacagggaaaatacccccgttattgttattgaaccctacgtattagcaatggaagacaatgatgtaaaaggtaaaaccttgaaagcatcaaacattgttgaagctattgtgaataccttagcgccattggaaaacttgaaacgatcgcctgaagcacgcttccgccagttgcacaagatattgaaagacagttcacgcgctggctatcaacatgtgttaataatagaagaagcacactcgttgcctttaccgacattaaaacaccttaaacgattctttgaactggaagatggatttaaaaaactgttatcgatcattttgattggtcagtctgaactggaattgaagctatctgaacgtaatcaagaggttcgtgaagtagtgcaacgttgtgaagttgttaatttgtttcctcttaatgattatctggaaacatttctggattttaaatttagtcgcgtaggcatgaagactaacaagattttagataatagcgttattggtgctatccgtgaccgtttatgtcttagtcggcatagtggtaaagaaactgttagtttattatatccattagctatcggaaacttgattattgcagctatgaacatggctgcaattaatgagatacctatggttgatgccaatattattcgcagtgttagctaa

SEQ ID NO: 10347 - DNA, 1785 bp, Photorhabdus luminescens
atgaataccacaatgaccgaacgattagtttctattgcacaggcagcacataaagccggacatggcagtaaagaagcaatatatcgggcggcttgtgaagagctgtgtatgtcacgttcaacattgattaaaaaacttggtgaagtttctggcaaaaagccacgcaagaaacgttctgatgcaggtaatagcgcgctgacacgtgaagaagcaactttgatctcaggggtattgatggaggccactcgtaatacagggaaacggttatatagcctcgaacaggccgttaatgatctgcgttcaaatggcctgattaatgcaggccatattgataccaaaacaggcgaattttctccgttatccattgacgcgattagtcgtgcattgcgccagtacaaacttcatcctgaacagttgaaaatgcctgcgcccagcctacaattggctagcctgcatcccaatcatgtctgggaattagacgcctcaatttgtgtgttgtattacctaaaaaaccctaataaaaacaatggggttgacagtggattacgcatgatgcctgtggctgaatttaataaaaataagccgaaaaatctggctcgtatcattaatgatcgcgtctggtcgtttgaattaacagatcacacaagtggctggatatatgttgaatacttatttggcggtgaaaccagtcagaattttacttctgtgttgattaacgcaatgcaagatcgtggtgacgcagatgtattacacggtgtaccccaaattttatttactgaccccggttctgctttgacagcacctacactacgtaacttgtgtaaggtcctaggcattcaaatgatacaacacaaggcccgtaacgcccgtgctacgggctctgttgaaaaagcacgtgacatcatcgaacgcaatttcgaatccggtttacgctttcgacaggttgataatattgatgaacttaaccgtctggcacggctatggcgtatgaagtttaaccgcagtgcaatacatagccgacatggacaaacccgtacagattgctggctaaaaatcacagcagaacagttagtaaaagcacctgccattaacgtttgtcgtgaattggcaattagcaccccagaaagccgtaaagtacaggcaaccttgcgagtatctttcaggggacgtgagtatgacgtcagtactgttcctggggtgagtgttggtgattcaatcatgatcacccgcaatccgtggcgtgacgaagaggcacaggtagtcattactggtgaagatggctttgaggcttttcatcttgttaatgaagttactaaagatgagtacggctttgccatcggcgcacctgtaattggtagtgaattccaagccattcctcaaacaattgcacaacgtaatttagccgaagttgaacagaaaatcatggggacaaacaacacggctgaaactgaaatagcacgtaaattgaaaacacttcccctcaatggtcggtttgatccatatttggatattgaacgtaatgatgcaccaacgtatatgccaaaacgtggacaagcctctacggtacatagtccacgaattgaacagcttatgaaccccgttgatgttgtcaaaattttacgtgaacggttccaatcacatggtaagacatggcgtggtgaattttatcagcaaatagttaaacgctttcctaatggtgttccaacagatcaaattgatgagttggttgatgaattcatagggaaatcaacaactgttgtatgcaatattgttaacggtaattaa

SEQ ID NO: 10348 - DNA, 924 bp, Photorhabdus luminescens
ctggccgaagatgttcaacttgccgacgatctacaggtcaatctcaacgctatgacaacacaccgcctgcaaatcatggaacagtttggtgatggtttgccgtatgaacgtgatcgcatcgtccatgaaacccgtttctacatggctcagagtgctgaagcgatgttagaagctgggaagcgtctcattattcttaaagagaatgaacctcatggcgagtttgttaacatcgttaaggatcaactcggtctggaaccccgtattgcccaaaaaatggcacaagctgcactcaaatttctttcacctggattagaaacaaaagcgaaaacgttttcgcttttgggacgttccaaactgtatgagttgatgcttgaagatgatgatgaactgtcagaattggctgaaggtggcactgtagctggtctgacattagatgatattgatcgcatgtctgtccgcgaactacgtaagaccctgcgtgatacacgcgctgatctggaaatctcacgccagacggtgcaggaaaaaaaggaacttgttagtaatttgattgaggagaaatctgcaatccagcacaaacttcagcgccgaattaatcatgaaaaacctgaagaggaaggtgcagctttgacacaagaggttaattcattgtcttttgctattgatgccgctatcaccaatcttttcaatggatttgaaacacttaatgaccataccacacgcaccgatattagtcatgttgggtttatggcaggcgtactcgatgaccttgaagtcaaaattcgtaacctacgtaatcactttaatctgcctgagtacagagaacacagcattgttcctgattgggctaaagaaagtgcggaagcagaagaggaaaaattcgaacgaccagaatggatggataaggaagaggcacatgaataa

SEQ ID NO: 10349 - DNA, 309 bp, Photorhabdus luminescens
atgcgcaaaattaacgtttccagttctggtacgcgcatattacgagttcttaaggctctacgtggtcattccttgtctgggatgagtaatggtgaattagcggaattactggaggaatctcctacaaatattaatcgtgcactaaatacattaatagaagaagggctggcgcaaaaactgggtagcggcagatatgcacccggtatgcaattactgcaaatagcacaatcgttctctaatgaaatggctaacacccaagccaaaattacagaaatgaatcagcgcgttttggctggtagcagaaattaa

SEQ ID NO: 10350 - DNA, 186 bp, Photorhabdus luminescens
atgacaccggagaaaatcaaacagcgctttcagcaagacggtatcacagttactcaatgggcaaacgagaacggttattcgcgcgaggctgtataccgcgttcttaatgggcaatccaaagctaattacggaaaagcccatgagatagccgtaaaacttggcctaaaaactccaaatataggctaa

SEQ ID NO: 10351 - DNA, 399 bp, Photorhabdus luminescens
gtgaactttgattctctttgtgcggctcgtctaaaaaaagaaagaaaacgcctgtctttaaaacaagatgaggcggctcaaatgtgtggtgtatcacgtgagatgtggagcaaatacgaacgtggtgtagccgttcctggtggtgatgtatgggttgcatttgcattggctggagcgaatgttcagtttattcttacaggtacatcctcctccaatgttgtattatctccagatgaatctgagttggttcaatactatagacaagcaccattagctcttaaggttgctgcagtagcggccttacagtcaggactctcgaacgttagttcaacaaagcaaaaaataacaggtaatggaaaccgaattgcaggtagggactataacgagcataaaaagtag

SEQ ID NO: 10352 - DNA, 345 bp, Photorhabdus luminescens
ttgaaaattaacggggataacaatcgggtcgcggctaatgattatcatgagtataattataatggcccagagccatgcccatattgtgaacagcgatatttgacaccaggtcgacaatattgccgacattgtgaagctgagtttgaagatgcggaacaacaacgtagaaatcaggaaatagatctacgatttgcgttgatattgattgttgctgttttttgtataggagctatatttcttttactttttaagtttggtccagaagaatggcaggcaggagctgcactggggatgggggggtgttttttcgttatagtatctatattacggaaacatcaattgtag

SEQ ID NO: 10353 - DNA, 444 bp, Photorhabdus luminescens
ttggggataacatctatgttgacgttacacggttcagttacgataattttcgtatttctgatatttggttgtggtgaaatgaatacacaggaaataacagatacatctactatttctacattgaaatttatagtcaaaacagataatccgttagtccaaaaattattgccaactattagggaaatgtgcccaggattggataaatactctgatcaatttactgacatcacagtttacgaaaacagttatccttcacgcacaactatcaaatttcatattgatgaaaatgccaaactgtctaatgattatatggctcatggaaataattgttttcttgatatagaggataacgaaacagttttatccatatctaaatcagcttgccaatctgtttgtttagatcaacagaatgtacctggtggaacattgaaattgaaactttag

SEQ ID NO: 10354 - DNA, 438 bp, Photorhabdus luminescens
atgtctactacaaacatagaaaagtttaatgaaattgtaggtattatatttgggaaactatatgagtcatttcctttaaagatagatcttttatctatagaggtaatcggtgaaccccttcaatattctgatggaacatactctgacgaactttgtactacagtagaagatcatagattttttctggatacagtggattggctcataacgaatggttatttggcagggactatgagctctgaaggttgtcatagagccgtattaacggctgaaggtttagaagttcttaaagtaatccctgacagcttagaaaccccattaggtgatcgtattaaggaaacactgaagactgaaagtaaagaagcattaaggtctttaattagccaaactctcggaataggtttacagtttgtatcccgttctattggcttaggttaa

SEQ ID NO: 10355 - DNA, 771 bp, Photorhabdus luminescens
atgaaagaacaatctttacctatcgttccgtggatcggtggtaaacgccgattagcaaaacatattttaccgttatttcctgagcatacctgttatgtcgaaccgttctgtggtgctgccgcgctgtatttcctaaaagtaccgagcaaatgtgaagtgattaatgatcttaatggtgagttggtgaatctttatcgcgtaataaaacatcacttggaagagtttgtccggcaatttaaatgggcattggtcagccgccaaatatataaatggttgcagattacccccgaagaaacgctaaccgatattcagagagcagcacgtttctactatctccaaaagcaggcgtttagcggtaaggttgctgaacatactttcggtacttccaccaccagcccaccgcgatttaatttactcagaatagaagaagagctatcaatggctcacctacgactagcaagaacgatcattgaaaatatgaactggacacaatgcgtccaacggtacgacaggccacatacgctgttttactgtgatccgccgtattggggtaccgaaggatatggcatagatttcggacttgagaactatgatctattagcagaactagcacataccatccgaggggaaatggtaatttcggtgaacgatattccagaaatgcgtaaggcattcaaaggattgaaaatgcaagtagtcaatatcggttacaacttgaaagttacggggaaagctaaacagagtaaagagctgattatttgtaatttctaa

SEQ ID NO: 10356 - DNA, 351 bp, Photorhabdus luminescens
gtgaaaactttcaaatcgtttgtatcacttatcaaaaaattacgcctcggtggctggttgttaacagctgttctattgctgatcactatcggtttagtttcccctcaacaagtccctgttgtgatttacaaattgtcgcttattgctctggctgttgtcttggggtactggcttgaccgcagtttattcccgaaagcaaggcccggtcagtatctgaaatatgatgaaatactcatgaaagaaggaaaatatcccgttcagactggctaccatatggtatttgctgccgttctgatacgccgtgcactgattgttgccgctacctgtctgagcgtagctacagggttgtga

SEQ ID NO: 10357 - DNA, 588 bp, Photorhabdus luminescens
ttgttgtggtgtagtggtatggtcagcctagcattggctgacgaactgccacaccgttcgcggcaataccgcaatgacttaatacgtgcttctcgtgtgatctggggattgaatgcgcctgtagctgattttgccgctcagttgcatcaggagagtgactggaaatcacgagctatttctcctgttggtgctcagggtatggcccagtttatgcccgcaacagcggattggattagtcaacgcattcctgaattatccaataaagatcccttcaacccaatctggtctatacgggcaatggttcactatgactattggctatggcaacgcattaaagctgccgataagtgccaaagaatggcgatggcgctgtcttcctataatgggggcttaggatggttactacgggataagaagaaaaccgaggcagttggtctcaatccgtgggtctggttcggtcatgttgaatctcagaatgctgggcgtagagcgtcagcatggaaagaaaatcgacattattccaaacgcatattactggaactcgcgcctcgttatttggcttggggaggtaccagctgtgccaattaa

SEQ ID NO: 10358 - DNA, 624 bp, Photorhabdus luminescens
gtgccaattaaattatgggctaaacctgttgtattgattttgtcgctaattggcatgttcgctttggcccactggagaggccataccataggctttcagaaagcaacggagacaggaaacactgcattagcacagcagaaagccgaatttcttcagctggaaaagcaacggacagagcgggaactggcggcactcaatgccttgcagcaacgttaccaaatgcaggtcaactcagcgcatcaggcagaagccaattatctcaacgatattgaacaactccgcactcagaaccaacaactgaagaggaaaattgaccatgttacccagagttggatggatgaaaaacaacagtttcatcctgttaattgtgtgtttactcgtggcttcatgcagcaatacaacgccgccctcggcctgtccagtgaacaaactcgctctgtctccgttacctccggcgctgatgaaacgttccgtggaaatgaaagctctgatgcccaactacggccatccggtatcacacaacgagatatccttgccaatatcatcgataacggagaacagtgtcttgcattgaaagcgcaggtcaatggcctgctggattacatcgaaggattacaacaatga

SEQ ID NO: 10359 - DNA, 333 bp, Photorhabdus luminescens
atgacactacagattgaattttgggctgccgtaggttttctgctctctttccttggtttcgtttttggtatcgcaaagtggttattcagcaaagccgaagagcgacaggaggaaagacacgcctcgttagagcaagcgcttaaaaattccgtagacaattggtctcagctcgaacgtgagtttatgcagtttaaggctgacttgccgctgaattacgtgcgccgtgaagattatattcgtggtcaaacagtaattgaagccaagctggatgcgctttacagcaaattagagatggtgcagcagcaccgaattgccggaggtaaaaatgattga

SEQ ID NO: 10360 - DNA, 312 bp, Photorhabdus luminescens
atgattgatgttgctcgtgttcgtcgtgaatcattgcgctggagtctgttggtcgcactgaataaaacccgcccatataccgccagtgaaactttgttattggatatatctcgcgcgatttatcctgacgtcactgcattggaattacggaaggaattggattatctggcagaccgtaaattaattgacctcaataaacagccatcgggtagttggtttgctgacttaactcgtattggtgttgatgttgttgaatatacggtcgaatgcagccttggtattgctcgtcctgaaaagtactggagtgaataa

SEQ ID NO: 10361 - DNA, 546 bp, Photorhabdus luminescens
atggcgcgtcgaagcactattgataaactccctgaagacgttcggcgttggttggaacgggctttgactgaatcaggatttagtggataccaggaactcgaaaccttgctgcgtgatcaaggttatgtaatcagtaagtctgctattcaccgttatggacaaaaaatagaaaagcgatacggtgcaatacgggcagcaacagaagcagctcggatgctcacagaaggtgccgtggatgatcaagatgcacgttctgaggctgtgattgctttaattcagactgaactttttgaaagtattattcaacttcaggaagctgaaaacggagagattgcgccaaaagagcgcgtcacactgctttcaacggtggcaaaaaacgtagctacactttctcgtgctagcgtgaatctgaaaaaattccaatctgaagtccgggcacgaactgaagctgctgcaagtaatgcagagaaaattgcacgcaaaggtggattatctgccgaagcagttgctgcattacgtcgggaaatattgggaattgcgacatga

SEQ ID NO: 10362 - DNA, 1524 bp, Photorhabdus luminescens
atgagtcagcttgcacctgttctaccagatacttcctcaatagcagcacctgtcgtcttattgccataccagcaacgatgggtggccgactcgtcttcttttaaagtcaatgagaagagtcgtcgaacgggaattacttgggctgaagcgtcagataatgtactcatcgccgcatcttctgccgctgcgggtggcatgaatgtgtattacatcgcctataaccaagatatgaccattgaatatattcaagcctgtgcaatgtgggctcgtgctttcaactatgcagccagtgaaattgaagaagggttctgggaagaagacgaagatgataagcacatcaaaactttcactatcaaatttccagattctggattccgtgtagtggcgctttctagccgtccgtctaacttgcgtggccgtcaggggatcattgtcattgatgaagctgctttccacgaacagctcgatgaattactgaaagcggcgctagccatgcttatctggggcggtaaagtgcgagtgatctccacccataacggggatagcaacttgtttaatgagttgctgaacgatatccgggcaggacgcagggacggcgttatccaccgtattacctttaaggaagctgtggctgaaggactatttcaccgtgtctgcttacgtaccggacgtgaatggtcacaagaggttgaacaacagtggatgatgtcggtgtacaagttctacggagctggagcatcagaagaattggactgtattcctgctaatggtggtggagcatggttgtcccgcgctctgattgaatctcggatgtctcccgatacgccactgctgcgactgacttgcccgaaaggatatgagcttaaatccgatgaaatacgccgcacagataccgaagagtggctaaaagccaatctgaaaccgttgttagatgcattgccttctgatgctcgttcgtttctgggacgcgattttggccgcagtggtgatttgtccgtggattatccattgctgcaacaaaaaaatctggtacgcagagtgccgtttgtgctggagctgcgcaacgtgccatttaaacaacaggagcaaatcacttggtatctaatggatggacttcctaatctgctgggtgcagcctttgatgcccgtggtaacggtgcttatctggccgaatatgccgtgcaaaaatatggcgtcagccgtgtgcagcaagtcatgctcaccgaaggttggtaccgtgacaatatgcccccggtgaaggctgcgctggaagacggcaatctggaggctctaccaaaggatgaagacactttggatgacctgagagcagtacaggtcattaacggtgttccccgtgtacctgatcagcgctcaaaagcaaaagcggacggtggcaagcgccacggtgatgcagcgatagcccttgccctagcgtacttcgccagccgtgaaattaacaaaggtccggtgaaggcaaattcccgccgacgccgtcagtctgcacgtatgctggagggatactaa

SEQ ID NO: 10363 - DNA, 1494 bp, Photorhabdus luminescens
atggctcgtggtatctgggtttcaccaacagaatttattaacttttccgaatcaaagcagtcattcactgaacaaattgcatcgcgtagccgttccattgacttctacagtctgggcacatatctacctaaccctgatactattctcaaagcccaagggcgggatattcgtgtctatcgtgaattacgtactgatcctttagttggtggatgtattcgccgccgcaaggccggagtgaaagcactggagcgtggtgtagaacgtagtaatgcccctgtgcgagtctttaactttatccgtgacatgctcgcggacttggatatgtcacgtatcattggcgaaatgcatgacgctgttctatacggctatcagccttgtgaattgatgtggaaccagaatcaatcatggtcagtgacggatattgttagcaaaccgcctgactggttccactatgaccgtgataaccaactgcgttttcgtgcccgtgatgcaggcgtagaaggagaacgggttcctctctataaatttgtaacaccacgtcaagatgctacttatgacaacccttatggatttccagatttatccatgtgcttctggcccgtcacctttaagaaaggcggcatgaagttttgggtacgctttgctgagaagtatggttcaccgtgggtgattggaaaacatccacgaggtacgccacaaagtgaaattgatctgttattggattcgatggaagcgatgattgatgatgcagttgccgccattcctgatgattcctccgttgagattaaagaggcagcaggtaaatcagacagcagtgatatttaccagaacttaattaccgttgctcgcagtgagatctctattgcgttactgggacaaaaccaaacaaccgaagcaaacagcaataaagcctctgcacaagcgggattggaggtaacggatgatattcgtgatgctgatgctgacgttatcaccagcgccattaatcagactatacgctgggttgtagaactgaacttcggtaacgttgaatgtccggtctatcgtctttgggaacagcaatcggtagatgaaacacaggctaatcgtgatgttaagttgagtcaggctggtgtcagatttactccgcaatactggaaacgcgaatatcaattgcaggatggggatattgatgaaacaaccttgtcaaccacgcctattccaccactcccactggcgttctctgaagctgttcacgcagatttagcagcacaagacaccttagatgaagcactggatattttgatgaatgaaggatcattgaatgaatcattggaatctctgctgcttcctttgttctatcgtgttcaaaacggtgttaatcccagcgatctaacaggagagttagccgagctttatccacacatggacgcagagggtttgcaagagcagttagcacgggttttgtttgtgtctaacatctgggggcgcttgcatgagcataaccacgcctga

SEQ ID NO: 10364 - DNA, 810 bp, Photorhabdus luminescens
ctggcgtattgcatgacattacctcccaagcgagccattggttatctgcaatctaagggctacaagataacgtgggattgggaagaactttggcaagagactcatgcccgtgcattcacggtggcgaaagtcacgcgtctggatattctggaagatattcgccaggcgctacagcaggcactggatgaaggcaagactgatcgttggtttcgtcaggagctggagccaacattaagacgtaaggggtggtggggaacgaaagaaaccgatgaccccgttacaggggaacgtgtcactgttcagcaaggtagcccgtggcaccttgagactatctttcgtaccaacatgtcggtgctgtacagtgcaggccgttgggccgaacaaatggaaaatattgatgaccgaccgtactggatgtatacagggatcaacgataaccatacacgcaagagccatctcgcattgcatggtttggtatttcgctctgacgaccctttttggcaagccttctatcctcccaatggttggcgttgccgttgcagtgtgattgccctcagtcatgatgatgttcgtgccagaggggtgaaagttatgcattcaggtaaagcaatgggctgggagttgaaattggtttcacaaaaaacaggtgagatgcagcctgttgctacattcaataccggcataacaaaagtagcgactgatgtaggttggtcatattcgccgggggcagcatatcgtcccgatttggccagatatcatggggagctatctggactggcccgtcgcgaactgggaagacagaatgagtaa

SEQ ID NO: 10365 - DNA, 450 bp, Photorhabdus luminescens
atgagtaatatcactatcaccattaatgatggagacctaagacgtggactgcgggcattagaattggctactaatgatctgacacttgccatgcgtaaaattgctggaacattgtcagcagaaaccgcttttaactttgaagccgaaggacgcccggcatggataccctcagtggcggcaaaagaacgtggtggtcagacactgcaaaaaactgctcgtttgatgcgttcagtcagtacccgatatgatgctcacacggcaattgtcggtacaaacttagtctacgggcgtattcatcaattgggaggtaaaactggccgcgatcaatctgtattgttaccagcccggccttatctgcccgtaacagaacaaggcgaattatcaccagaagcagtaagagccgtattaagtaccattcaacgacatcttgaatcagcggcgcatcgttaa

SEQ ID NO: 10366 - DNA, 1095 bp, Photorhabdus luminescens
atgaagtcacttcacattttcaaatccggtacacataccgatatgaatggcaaacaattgccgttcagccccgcagatttgcaagcttgtgcaaaggcttatgactcatcgttgcatgaagcaccgattgtgattgggcatccaaaagacaatttgcccgcctatggttgggttaaatcgctgacatcttccggtgatgacttgattgcggagcctcaacaggttgatgttcagttcgctgaattggtcgatgcaggccgctataaaaaaatttctgcttctttctatttacctgattccccaaacaaccctaaacccggcgtgctctatttgcgtcatgtcggctttttgggggcgaagccacccgccattaaaggattgagacaggttgaattcagtgaacaagaatatggtgtcgtcgagttctctgattggagtgatatcaccaacgcttcactttgggggcgtttgcgagaatttttgattagtaaattcggtatggacgaagcagacaaagcgcttccttcttggcaggtagattcattacgtgaagaagcttatagcacgactcagcctgctcctgcctttcatgaacccaataacacacatcaacatgaggaaaacatcgtgacaaatgaagaaaaaaaggcgctcaaagatgaaaacactcgcctgaaagaacagcttactgcccgtgatgctgccgacgcaaagcgcaaacaaactgagcaacatgccggaaacgtggcatttgccgaaaagctgatcacagacggcaaattggcgccagctgctcaatctatcgtgatcgccttgctggacgctgtaacccaaggagattcccctgtcgagtttgctgaaggtgatgtgaaaaaaccattggctactgcgtttaaagatctgctgagttctgtccagcctgttattgattttggtgaacatgcaacaaaagaccgggtagaccaaaacacatcatcagatattgctgagttttctgatgcagatcctgaacgtctggcgttgcatcaaaaagccgtcgctctggtgaagaaagaaggcatcagttacgacgtagccgttacccgctgcctgtaa

SEQ ID NO: 10367 - DNA, 936 bp, Photorhabdus luminescens
atgtctgattatttgaaaggcaaacgtattgttgatcctgtgctaaccagtgttgctcgtggttataaaaatgcggcattcatcggcgaacatcttttccccgtcgtcgaaatggagaaagaaggtgctagtgtgccgacatttggcaaaagtgcttttgtggaatatgacaccacgcgtgccgttggtgccaacagtaacgttttgatccgtgagaaaggctcttcgttagatattgtgctcaacgaacatgatctagctgcacctgttgattatcgtgagaaatcagaatccttatttaatgaagaagcaaaggcaatccgtcgttccaccaatggtgtgaacctcaagcgcgaactgtatgcagctcgattggcacaagaccctgaagtttatcttagtgactcggtgaagagtctgacagctaatgaacgttgggctggtggcaaaggtaatccaatcaaagtcattgaagctggagttgatgctgttcgtactaccattggtgtacgtccaaacctcatgacaatgggggctagcgtgatgtcactgttaaaatttcatcctgaaattcaggcagctattggagccaacgaacgtaaacgtatcacaatagaaatactcaaagaccttttccaaatccaaaacgttgtcgttggtgaacctgtttctactccaagcattaaagaaaatcccgttgatatctgggctgataatttgatgttgcattacgtatcacctccgcaggcaggagcagaaagtgctgatgagcatgaaccctcctttggctatacgttccgccgcaaaggaatgcctgtagcggataaatatgaaggtgtgggcggtaaggtcaattactgtcgttataccgatatttataaagttgcggttgttggcggtgatgccggctatctgattaccaatattgtgaagtaa

SEQ ID NO: 10368 - DNA, 351 bp, Photorhabdus luminescens
atggcagtaacacaacaatccgtattgacgacaacaattatcgccagtgcgaacatcatccagcatcgtttagttagtactgataatgcaccgtgtcaggctggagccgttgcacttggtatagcagaggtggatgcgaaggctggagatgtcgttcctgttaatgtattgggcattattgctgttgaagctggtgggccaataacccgtgggcaagtcgtacagtcggataaggatgcctgtgtggtaccactgagttcggctgaaaatgctgccggaacatctgtcgggtttgcgctggatgatgccacagcggcaggtaatatcattcgcatcttacgtggcatatga

SEQ ID NO: 10369 - DNA, 450 bp, Photorhabdus luminescens
gtggcatatgacatgtattgctcactgaaagatttgcaagagcagataccaacgcaatcattgatatggctgtctaacgaagaacctaatgctcagacgatcaatgagcctgtggttaacagtgccatccgctatgccgatgaactcatcgatgcccatttacgtgggcgttatatcctgcctctggcggaagttcccacggtattacgtgatgccgccattacgttaacacgctatcggctgtatgcccgccgtccagagggttctattcctgaagccgtgatagatgattacaaaattgttttgcgccaactggctgacatccgagatgccaaactaacactgggcctgctttccacaggaaaagatgcccctgaaccgggggagtttcgtgttcgggcgcgtcgtcccacctttggagggagtaaaggaatgttggagaaatactga

SEQ ID NO: 10370 - DNA, 468 bp, Photorhabdus luminescens
atggatgtttcgccgatcattgatgccattatcatgaggctaagagaaaaactacctggcttacaggtggagtatttccctgaaaggccaactgaattcaggctgaaccatccggtgggagccattttaatcagctatcccggttctcgcttcgacaagcctgaagatgttggggcggtattgcagacacaaactgtcatgctcaatgccaccatagtttttcgtcagcttaatggacgtcacggtgccgttgccacattagatgatgtacgccgggttctcggcggattccaaccaccgaactgccaacgaaaatgttggctggtacgggatacatttctcggtgagatagctggtttgtggcaatacacgctggattttgcgactgaaagtgtatttatcgaagactgtgagttaccgaatggttcgccgttagcccaaatcaattatgagggaactgaacaatga

SEQ ID NO: 10371 - DNA, 213 bp, Photorhabdus luminescens
atgaaatacctctatacaggcccagcaagcggcgtcactttagctgatggcactgaagttttgctctggtcagaaaaaactgttgatttaccagagcagcatgattatgtgaaaacattgatcgcgctgagatatcttcatccactgtcagaacagcaaaaaaatcccctgaagaaaaaagaaaagcctgaggaggccactgatggccgctaa

SEQ ID NO: 10372 - DNA, 1428 bp, Photorhabdus luminescens
atggccgctaattatttgcatggcgtcgaaactatcgaaatcgaaaaaggctcgcgtcctgtcaagacagtgaaatccgccgtgatcggcttaattggtactgcaccgatagggccagtaaatgcagtgacactttgtctgtcagaaaaagatgccgctcaatttggtactcaaatgaatggttttaccatcccacaagcactggatgctatttatgatcatggggcgggaactgtgctggttattaacgttcttgatcctgaggtgcataaagctaatgttgccagtgaaagcattagctttgataaaaccacaggaacagcgaaactggctaatcccgtggtcagtaatgtcttactaaaatccacctctggtagtgccccttatgtagaagggcaagattattctttggatgctcaaacaggcagcctcaagaatatcggtaaaaacattgctgcgggcgcaaccgtgattgccagctatgactttgccgatcctacattagtgacgcctgctgacattattggcagcatcagtgcagcgggtaaccgtacaggtatgaagttactgaatgatacttataacctgtatgggttctttgccaagattttgctggctcctgtctactgtacccagttaagtgtgacaacagaactgattgcccttgcaactaaattgggtgccatgacctatattgatgccccgataggcaccacttttgttcaggctatcagtggccgcggcccgtctggcacaatcaattttaataccagttctgatcgtgtccggctgtgttacccacacgtcaaagtctatgatgcggaaagcaatagcgagcgcctggaacccttgtcatctcgtgcagcagggctgcgtgccaagattgatgcagacaaaggtttttggtggtcatcctccaatcaagaaattatggggatcacaggtattgagcgccagctatccgccataattgacgatccacaaagtgaagtgaaccagctcaatgaacaagggattactacagtgttcaataattatggctctggtttgcgcttatggggcaaccgtaccgccgcgtggccaactgtgacacacatgcgtaacttcgagaacgtgcgcagaacgggcgacgtgattaatgaatccctgcgttacttcagtcagcaatatatcgatatgccgatcacgccagcgctgatagatgccctgacagaatctgtgaatgcctatggtcgtaaattgattgctgatggcgctttgttgggattcaaatgctggtttgatccgacccataacgaagaaacggagctggcatcaggtcatctgttactcagttataagtacacaccgccaccaccactggaacggctgacatttgagaccgaaattacctctgaatatttgctgaatttaaagggaaataattaa

SEQ ID NO: 10373 - DNA, 525 bp, Photorhabdus luminescens
atggccggaaaaatagagattaaccgcatcaccaacgccaatatttatattgacggcaataacctgttgggacgggctgaagaagtgaaactgccagacgtttccatgaccatgcaggagcataaggcgctggggatggtcggcaaagtggagctaccggcaggcttcgataaactggaaggcgagatcaagtggaacagtttctaccgtgacgccatgttatctgctgccaatccctataagtctctggcattgcagtgccgttccagcgtccagaaattcagttcacaggggcgcattgatgaagtgccattggtgacatatctgaccattttatttaagaagaatccgctgggcacatttaagcaacatgaaaatgctgatttttccagtagctttaccagtacctatattaagcaggtactggatggtgaggagctgttagaactggattatctggccaatatcttccgtgttggcggcattgatcaactgaccgattatcgcatcaatattggaggttaa

SEQ ID NO: 10374 - DNA, 327 bp, Photorhabdus luminescens
atgtcaaccacgacttaccatcttcaatttccctataccacggctgctggcgttcgcattgaagagcttcagttatcacgtttgaaagttaaagatatcaaggctgcccggcgagccagcgaaaatcctactgactgggatgatattttgatagcacgttcgacaggattgttaccagaagatatcgaacagatggatgttgctgattatctggcattacagaaacgatttcagcaagttatcggattggatcagggaaataaaaacagtgtggcaagcatcggcgatgttggcacgatggttccggttccagccgagcgagattga

SEQ ID NO: 10375 - DNA, 2553 bp, Photorhabdus luminescens
gtgtcaacagaattttccattggtgtcattattggtggggccattagtagtgcgttcagttctgccatgtctggtacacgccgtactctaggaacactgggagaaacgactcgccaactggagaaccgacagcaggcactgaaccgtgctgttgaacgttacggtcaacttggttcccgtagtgcccagcgtttgaatgcggatctacaacgcatcagtcgaacgctggaacagttgaaccgccagcaacagcgcttacagtctgcggctagcatgagtgatgcagccaaagcgaatcgtatggcgctatatgcacagggagccgaaacctatgcattaactcacacgatatcctctcccgttgttcagtccgtaacaaagtatgcctcttttgaatcaggattaagggacatagctgtcactggcaatctgtctccgaaagaagagcaaaaaatcggaatcatcttgcgccagaacgccaagcaaacaaaccaattacaagaaaccctgttggaaggtgttagcacattggttgccgccggaaaatctcccatgaaatcgaccgatatgagtggattattgggccgcgtcgccacggcgtccaaagctaatattaatgacttagccaaaatggctctatcctttgagtccctgaaaattggaggtgatcaagcgctcaaggaagcctttaaccgagccgttttcggtgctaaatcgggtcgttttgaattaaaagatctcgcccaatactttccagaaatggcgcagcaatttgctggtaagggaatatatggtcaggaggcagtttcacagattattgccagcttggaagttggccgtgaaggcgcaggaacggaaggtgaagcagctaccaatatgaggaactggctagcttcaatgggacgtggtgatattgccaaaagatacgctgaagctgacgtcgattatcaaacctcaatgagcagatatgtttcttcggggtactcacaatatgaagcctcaatcatgatcgcagaccgctttatcaagagtaaaggcgctgatctcatgaaagagtggaaaaaagcgggagccagaggtgatgaagatgcacagcgtatgctcatggaatccttcgggctatcctctattttcaccgacgtacagacagtcaaccatctcttggccatgcagcaacgttggggagattatcagcgtatcaaaacaggcatgggaactgattcggcacaaaaatctgttgataccgattttgataaacagaatgataccttagaagcacagtggcggcgtactcaaattgaatttaatgattcggctattagcattggtcagtcgctgcgcccagcattaatacagttagccgaaacctttattccattgatggacaagaccggaaaatggctggccgctaatcctgaactcatcagcaatgttgtcacgctggtcggtgggttcttggcattcaaagcagcttcaatcggtgtcagattaggtcttaatcttttgctttcccctataactgatatctggaaaggtgcaatgttaatgcgcacacggtggttactgcttcgaatggctatcggcagtggcggcagatttggtgtcgttgcaaacatcttgggaaaaatagccggagcagctctctggttgggtagaatcctcggtagtgctctctataagggcttgatggtagctggcagagctattttgtggattggacgcgtactattaatgaatcctatcggattgatcatcactggtattgcagtggccgcttatcttatctatcgctattggaagcccatcagtaatttctttaaaccgctttggatcttagtgaaattcgctttccaaatgggatggcagggaatcaaaaatatttggtctaacgtcaaaggttggtttacagctcgatggaatgacattactaatgcgtttgatggcggaatatttgaggtcagtaaattaattttaaattggtcgccattgggattgttctataaaacattcgctgacgttatgaaatggtttggcattgatatgcccgataattttactgactttggtaaaaatatcgttaatgggttggttaatggtatttctaatatgctgaccacggctaaggacaccattaaaaactttggtggcaaagtttctagctggtttaaagaagcgttgggtattcaatcccccagtcgagtatttatgggatttggcgataatattgtgcaaggtgcggttgttggtattgatcgcactatgccgttggctgctcgtgccactcagcgtctagctgagggaatgaccccagatgtcccacaaatctcacctcctgagataatgtcgggcaatccaattaaacgaacaggttataaagatgccagcaacagcaataatggtttttctatctctttcgccccgcaaatatacattggtgataaacaacaaacggctatacccgatattagtcaagctttaaacctgagtatgcgtgaattagaaaaactgctggagcgtattgttattcagagagaacgccggaggtacggataa

SEQ ID NO: 10376 - DNA, 885 bp, Photorhabdus luminescens
atgtttgctgtattaggtgatattgaatttgagctaatcacatattgggatggttttgatgtaacgtttggtgttgattatgccgaacatgcccgaattcaaggtaagcccggcttgcagtttgtaggtgagaaaccggatgaaattcaaattagcttggtctttcatcaacattattgtacgccggatattgaattgaatcggctgcgtgaagcaatgcggaaacatcaagcacttgcgctaatattcggaaatggtgattaccgtggctggtttgttattactgatgtgacagcctccagtgaacaaacggattcagtaggtaatatatttgccctcaatgcctcggtgacattacgtgaatatatcggtgatcctaaaaaaccactgaaaccgcctgccattaaatctcatgtcccgaatacaaaggcgttgtctaatgcaataccgaaaccatcaggtatggctaaaaaagtcagggatggagtgaattatgccaaacaagcacaatcagcactgcaaacgacgatcagtgcggtacgtattgcacagaagatgaaagacaacccggccgtagcgttaacccgcgtaccaagtcttcttaccgggctcaacaatattgctggtccattagggaaaagctatccggcttttcaatcactcggtgactcattgccagatgcaattcaattgaccagagcaacggggcaagcagtaacatttgttaacaatgctcaatcgtcattaagccgtgcagatagctgtaatatcgcggctgcattggattctgtatcaactcaacttgaatcagccagttcaacatttacatcaatatcacccgcgcttagtaagatggccgcgcaaattaccacaagggcgctttga

SEQ ID NO: 10377 - DNA, 1179 bp, Photorhabdus luminescens
gtggctaagataattgataccaagcaaacaccatctataacgggtgtctcagaggttttaagtccgacattcacgttacgatatttgcaaaaagatatcacaaatgacatcactccttatgtcactcgtgtcagctataccgacaacatcaaaagcgaatccgatgaaatagaggtagagttggatgatactgatggtctctggctagataaatggtatccgggaaaaggtgatacgttgacattgaagttgggctatttcggagaacgattactgaattgtggctcattctatattgatgaaattgaagtcagtatccctccttctattgtatctgttcgaggtgtagcaacgtctatcaatacagcattgcgtaccaaatctaaccgtggatttgagaatacaactctggccgctattgctaaccgcatcgctaagaaacatcagttaaagctgatcggcagtatcgaaatcatcaagattgacagggtgacgcaatattctgaaaccgatgtggcgttcctgaaacgactggccagtgaatatggttatgccgttaaagttgtcagtgaacagctaattttctcccacttagccactttgcgcagccaagaacccataaaaaaattacaccctcgtgatgttgcccaattttcactacgggacacgattaataaagtctataaaaaagccaaagtgaagcaccaaaaggctgatgataaaaagttgattgtctatgaagctgatggcacgaccagtacaagtagtcagtccaatccaaaagataagaatagcggtaaagaaaccagcgcagacaccttaaaagtaaacagccgggctgctaacaaggatagcgctgaaataaaggctaagtcagcactggatttacataatgagtaccagcagaacggctcactttcattgatgggagcccctcagttaaccgccggaaataaaattgagttgattgaatttggcaagttatctggacaatggttaattacttcagctcaccactcttttgatcgtaatagcggatatataaccgaacttgaagttgctcgtggccctgttacatcaagcaaatccaagaaagataaaaaagataagactcagaaattggttgtatataagcccgatggttcttccgacacgatcatcgaggaggaatccaaatga

SEQ ID NO: 10378 - DNA, 606 bp, Photorhabdus luminescens
atgagcagtgtaactcgtcaagttggtacgattagcgccgtagatcctgctactgttcgtgcccgcgtgcgattgcctgaatgcgataatatgcgtactaactggctgaatgtgttgcagcgcaatacccagaataacaaagactattggttgcccgatgttggggaacaggttgaagtgctattggatgcgaatggtgaagatggtgttattttaggtgctatctattccagtgttgatcaaccgcctgctaataataaaaatatccgtggtgtaacttatgcagatgatgcagctttttactatgatcgtacctcacacaccctgactattaatggtggcattcagcacattaagatcgcagcgggagccaatgttgttatttatgcacagcaggcaactattgatgcgccggaaacaatcgtaaccggaaatatgttagtgaaaggtcagttaatctatcaaaatgggctgtcgggttctggtggtaatagtggtgctgcaaccattcagggcaatgttagcgttaatggcaacatccatgcaacgggcagcatcatggatgaaggtggtaactcgaatcatcattttcatgaatttctttaa

SEQ ID NO: 10379 - DNA, 363 bp, Photorhabdus luminescens
ctgtcccccatgaatacgaactcacattctgttttttggcaacccgctctccagaactcaggcaaaattgcctgtgggctggatgatatcgcccaagcaatactcattattctacgtacaccacgtggcagtgatccacatagacctgagtttggcagtaatttacacctttatattgatcaccccatagaccgcgcaattcctcacgttgttagggagtctattgacgctattacacgttgggaacctcgttgccagttgctctccgtgaaaccaactgtcaatggagagcatctaactctgcgtgtgaattggacagcagttgatggcattacacaatctacggagttgctatggcgctga

SEQ ID NO: 10380 - DNA, 1104 bp, Photorhabdus luminescens
atggcgctgacagaacctgattttatcgagcgtgatgtagaaaaaatcacaaccgaaatgatcgcaaaatatgaagctgatgtaggtaagactttgtacccagcacaggcagaacgcctgctgatcaatttatttgcatatcgtgaagcactaaccagaatgcaagttcaggaagccgccaagcagaatttggtcgagtttgcccgtgcgcccattttggactacttaggggaattggtcggagtatatcggctatccgcccaaccggcgcagacaatattgcaatttagtgttgatgaagcattagagcaagatgtactcattccagttggaactcgtgttaatgcatcggacagtattatttttgctactaatacagatgctgttctgaaagccggcacacggttcgttaatgtcacagctacttgtacagatactggattatcagggaatagctggcaaccagcacaaattagtacattgttggatgaaatcgacgacattgacccgcaagtgaccaacacaatagtgagcagtggtggttcggcagaggaaagtgacgagaggctacgtgtacgaatcaaaatggcccctgaatcgtttactaatgcgggcagtcgtcaggcttatcgttttcatgccatgcgtgcccatcccaatattgttgatgtcgcagtcatgtctcccattccgggcgttgttgaactgtttccactattagctacgggattgcctgatgaaagcattttaacgctggtaaaaagcttttgctctgatgaaaaaatccgcccgttgactgacattgtacatgcaaaacctcccgtgaaggttgattataccatcaaggcgaaactgaccttgtacagtggcgttaatgcacctggtattcaatcggcagcagaacaagccatacaaacatgggtagctgaacgagcaacaacgttaggaaaggatattgttcccagtcaaatcatctcaacattgtctgtttctggcgtctatcaagtcgttctggagtctcccacgtttcagattgtagatgaaaatgaatgggcgaactgtatcggtatcactgttgtggtcactggagtcgctgatggttaa

SEQ ID NO: 10381 - DNA, 513 bp, Photorhabdus luminescens
ttggcctctcgttttgatgatatcgatttaacccaattaatggtttatctcattgatactgccgatagaagcacgctgcattggctggcaaatcaattctccctatttggcgatggctgggagcttgtcgaatcagacaatgctcgccgcacgttaatcaaatcagctatagaattgcatcgatataaaggcacaccgtggtcaattcgtgaaattatccgtcgttttgggtttggtgaagttgatttaattgaaggcactggtcaaatcaattatgacggacatgccagccataacggtaattatgttcatggagattcaacatcctgggcagtttatcgcgtcatacttcagcaacctatcactaatgatcaagcctcgctactgcgtaccacactggcagcgtttgcgcctgcacgctgccaccttgccagtttggaatatcagtctgtatcaattcgttacaacaatactgtcagttatgacggtagttacaattatgggagcagttaa

SEQ ID NO: 10382 - DNA, 1020 bp, Photorhabdus luminescens
ctgtcagttatgacggtagttacaattatgggagcagttaaaatggctaatttgccggaaaccccacagtggtcagagggcgtgtatcaaatagaaacctcagaccccgtgttaggtgggcctgatggtatttccaatcggcaggctaaacagttggtcaaccgcacaaactatcttaaacagaaactagaacaaaatgggaatgagttgagggaacattctgaggtgcaagatccgcatactcagtatgcaccgaaagacagtcccattttcacaggaacaccaaccgcccccacaccggctaaaaacgctaataatactcagattgcaacaacagcatttgtgcaatcactgacggatacggcgaatcaaagtgctgtagctgcaaataacaacgctaatagccgagtaccatccattcgtaaagtaaatggaaaagcgttgtcatctgatatttcattgaatgccggggatgtgggaagttatgctaaatctgagagcgataatactttcttgcgtatttctagcgataaaactgcaaccgttggtagtttattgattgatagtaaaactccttttcctaaattgcgtttcaaatcgaaagatggatatatattgggaattaacggttctgaagggaaattattgcatatctattctgacgatcctaagaatcagcggcgttacaatatattaacgcctgagagaagtggtactcttgcattacaaaatgaagccataaaatccgaaaatggctggtggcaatgtggagatacggggattattattcaatgggttaaagttccatcaggtcagcaatcatggataaaggtaaattatccaatttcttttaaaaataagttttttggctatattgcaagcatgtcgagtatcaatacatcaacgggtcacacattagtacgtaatgcaacgttatcgacgtttgaatatcaagctggcactcccaacaacaatgagaatccaggcaaagttgttcatatattattttggggggtataa

SEQ ID NO: 10383 - DNA, 453 bp, Photorhabdus luminescens
atggtttatttctccagaaaagaaggcgctttttatagtgacgctcatgaagaatgtgttgaaataaccgcagaaaaacacaatgaattacttgacggtcaatcacgcggctttgctatcgttagtgataaagagggttatccaattcttacaaaacaagcaccgactgtttatcacaaatgggataatgaaaagtggataatatcagagagtgataaaataaagcttagacgggaacagcagcagcaagcagaacagaagaaacagcaacttatgttcactgtaagtaaacagatagctccattacaagatgctgtagatttggggatggcgagtgatgaggaaaattctcggttgaccgctttgaaaaaatatagagtattgctgaaccgtgttgatgctagcttagcgacagatatttattggcctgaaaaacccagagtaatagaataa

SEQ ID NO: 10384 - DNA, 288 bp, Photorhabdus luminescens
ttgcgtttgttatatggagatataaaggaaatgaataaaaaagattggcataccgccgacattatcgctgccttacgtaagctcggcactaccttagcagcggtatcacgtaaggagggacttagctcatctacattagctaatgctctatcacgaccttggcctaaaggagagtggattattgcgaacaatctcggagtacatccctcagaaatttggccaagccgatattttgacgagaatggacaacctattgaacgagttatccgaagtaattcctctaggtga

SEQ ID NO: 10385 - DNA, 294 bp, Photorhabdus luminescens
ttgatattcgattttgggatattaatcaaggttaaagaaatggcatcgatttattcatatgaatatcaattggttataaacactcttcgtaaagctaggatagaaaaaggtattactcaaaaaagcttggctcaagccttagatcgacctcaatcatttattgctaaaattgaaaatggtgaaagaaggttggatgtggttgaatttgtgcatatagcacacttgctatctgtcgattatgtgctaattttagaaaaaattttgttcaaaaaacaacctaaaaagttaaaatga

SEQ ID NO: 10386 - DNA, 249 bp, Photorhabdus luminescens
atggtttcaatttactctgatgaatatcaaatagttatcaaagcactccgtgaggctcgtatagcaaagggggtcacgcaagagaatttagctcaagcgctagatcgccctcaatcgtttattgcgaaagttgagaatggtgaaagaagattggatgttgtggaatttgttcatatagcacatttgttatcattagaaccaagtgttctcataaaaagaatcccaagaaaatattcctcgatatgctga

SEQ ID NO: 10387 - DNA, 558 bp, Photorhabdus luminescens
gtggactactttcgcaatgcacgaaaggtgttgggtgtcacagcaaaagaaattaacgctgccacaggaaaacagatggccagtcactggttcagtgatagccagtggcaattacccaatgaagtggattaccaaaaactgcggatattgttcgctcgaatagccagagaaaaacaccagaacggagaattaaacaggccatatcatgagttagtagaatctcatcttactttgtcacgccaatatgaggaattgagtctggaatatgggctgctgcgccgtccgttctcggtgacggtagatgtgccttatactgatgtctggtcttttccacctgttcagtattacccaggtaaacatccttgcgaaaagccggcagacttgatggcgcatattatccgatccagtagtcgggaaggggatttggtggcggacttctttatgggatcgggctcaacactaaaagcggcactgaagctgaatcgtagggtcttgggtgtagaactggaagaagagtactttaaccaaactaagcgggaaattggggtgatgatatga

SEQ ID NO: 10388 - DNA, 507 bp, Photorhabdus luminescens
ttgccctgtattgatttaaaagactcaataagcatcagacttcactgcattaagagaagaacgtatacttgcaacaaatttgaattacctgacatacacatttttatgagcttaatttacatacgactatatattaataaaattgttgttcgcaacgtcagcactggtaaagaagtctctggtacccccgacactccctttaccacatctcgtttattactagggcaaatgatacctgcaatgtttttgcttaaaaaattaataaagaaagtgagaaaaaatacttggtataacttttttttgtcaaaccatcatgtgattattcagccgatggaaatgaatgaaggtggacacagccaagttgaatttagagcttatatagatctcgctaagagcattacttcaagtcaaaaagttaatctctgttcaccgagatcacaaccactttctgacaatgaaatccgtcaaatactatccagcaattcactatttcgccataataactaa

SEQ ID NO: 10389 - DNA, 183 bp, Photorhabdus luminescens
atgcgtatggacaaatacaccagccccactgcatacacttggggcacatttacagcaatgcttggtgctctgtcgctgaacgactgggccatcattattggcattatctgcactgttggcacctttggggtcaactggtactacaagcatcgggagcttagccgcaatgacaaagaccagtaa

SEQ ID NO: 10390 - DNA, 537 bp, Photorhabdus luminescens
atgacaaagaccagtaagttaagtgctgcggttatcggtctggttctttctggtgcaggtgccacggcgatattgtctcagttcttggacgagaaagagggtaaccggctatcagcgtatcaagatgcggggggagtctggacaatctgccgaggtgttactcggattgatggaactcccgctcgtcaggggatgaggttaatgccgaatcagtgccgtgacctcaatgcacaagaagcaaagcaggctattgcatgggtaaaacgcaatgtgcgggtgccattaactgaacctcagatagcaggtattgccagcttttgcccatataacattggcccatcgaaatgcttctcttccacattctatagaaagctgaatgccggagataagaaaggcgcttgtgctgagataaaacgttgggtatttgataatggtcgagactgtcgacagaccaaagggcaggcaaacggctgttatggtcaagttgagcgacgtgcccaggaatcggaattaacttgctgggggctggatgaatag

SEQ ID NO: 10391 - DNA, 450 bp, Photorhabdus luminescens
atgaaatttagctttcattactacactatactagcgttgatccttatttcattgacagcgtattactatcactttgagttacagaaagagcagcatattacaaaacagcggcaatcagaaatccaacagcttacggatgcgcttgattatcaaaactcacatatcactatgctgcgcgagcttgatgtgaaacacactcaggaacttgctaatgccaaatctgaaattgatgctcttcgcagtgatgttgccgctggtcgtcgcaagttgcgcatcgcggcaacctgtagtcaaagtgaagcaggttccccctccggcatggttaatgcagccagctccagattggaagaccccgctatcagggattatttcactctcaccgaaagggtaacaatgatgcaggcacaattagagggcttgcaagactatgttagaacccagtgccgataa

SEQ ID NO: 10392 - DNA, 519 bp, Photorhabdus luminescens
atgtttttaagcaaacttgctcgctttgcattaactgcaacttctgtggctcctgtatgcatcacattggcttatttggctttcattcaaaaaaactacattatgcttggtgtgtatataactataggagtgattagtgtctttctctgtattattatattgaaatattctattcatcattcaggtcgaacaaaaaagaatataaaaacagctactccagctaataaagaagtaactaattactttttaacatatttatttccattgcttagtgcgtccgggacattttttgactggaaaattgctgcattcttttacattagtttgcttgcttatgtttctttctctgaaggttatagctttaatccgttattatcattcttcggttataaattttatgaagcagagggcgagacaggtattagttttgtattgattaccaaaagggatttatttttagtgaataacgacaggttagatgttataaagctaacagctcacacatacattgttgtttaa

SEQ ID NO: 10393 - DNA, 900 bp, Photorhabdus luminescens
atggaattatttgctataaccgacactagtaaaattgtgagaattgtcacagactcagagacgcaaaaatctgtaaacgccttgtttaaaaaacaaaaagaatattttgaaaataattatacgacatctgtagaatttagtggtggttatattaccagtcctgtggagtatttttgtattgataattttgatgatgttataggtgttcttgatgcaattcagacgcctacctccattcaagagtggagtccgcaggagatatctatttttaatataaaggctctgttttctggtgaaattacttcatctgaaacagaagataatataaaagcttatcttcaatgttttgataaaagacaaataatagataataaaaaaacattgtttcatagtatacttcaagacaaaaatacctttaagctatctgattctgatggtttgattatcgataataagctaaccgcaatacttgagggtaataaattaaaatttaaaagttttcatatgttgaggcgaatattcgatgttgatgggtattttaaagaggccactgatgatgatttaagagagttttctaatcatgatcatttccatatttcaaataattttgaccttacaagtcttgctgatacggtaataagaaagaaagtatcattaataaataaatcaagagtcttagagaattatactgtggatgctttattagcagcagctaatgaaaatggagtggtttttgatttagatatacacgaagataatggcaaaaggaaaattgcaatgccacaagagaaaaaacacattaagaggctattgtgttttctggatgaagattattttacctcgcagattactcaaacattatacaggacaaactctaagaaaaaggttaatcaatcttaa

SEQ ID NO: 10394 - DNA, 396 bp, Photorhabdus luminescens; identical to SEQ ID NO: 6330

SEQ ID NO: 10395 - DNA, 447 bp, Photorhabdus luminescens; identical to SEQ ID NO: 6329

SEQ ID NO: 10396 - DNA, 318 bp, Photorhabdus luminescens
atgttaaaaatattcaattgcgtaaaatttatcggattgctgattgtttttattttaccttgtatcgggtactcggaaacccaatacgtagatcctatgacaacatgtctaaatgattatgtccttcctaaattatcagcagacatactgcctgaaaagttagtggatgatgcttttattacgtgcaaatctcaggttgatgagtggcttaagccttttgaggctattgataaacgtgaagaaaactataaatctatgcatgatttttatgttcgaatggtaaatatcagacggaaagccgaattaagcaataactga

SEQ ID NO: 10397 - DNA, 720 bp, Photorhabdus luminescens
atggcaaaaaatactgactgggagggaatagagcgtgattaccgttccggctttctctcaatcagggagattgccaaaaagtacggtattagtgatgccgcaatccgcaagagggcaaagactgaggaatgggttcgcactattgttgacagtacgcagtgcgaacctgatgcgaaccaagcggaaagtcaggtagcaagtaacaccagtaatatcttggagtctgaaaagttcgcagagagttcgcaaggaaccgcagggattctaaagccgcaatacgaacagtttgctcaaaacatagcggcgggtatgccgatgaaagaggcggcaatttgtgcgggttactctccagcccgtgctgattctcaatcatccatattgatacgcagaccggaaataaaagcccgcattcgagaactgagaaacgaagcggcgttgcttgtttcattcaatgctggacacctggctgaattgtcgtttcgtgctgggaaggaagcgttagcagataagaagttcggacaggttgcgccgaacattaagaacgctgcgcaacttaccggtatcgacatgagcagcaataaaactgaggtcaatgttgatctcgctggcctgagttatggcaaagtctgtattgtcactcccgccaattgtcctgctgatgtctgggcttctcacatggagaaattgcgcgagggaaaacaggtagcccagtcatcatag

SEQ ID NO: 10398 - DNA, 1206 bp, Photorhabdus luminescens
ttgggttctgttcgctggcgttggacatatggcgggcgtggtggcggtaaatcggtagagattgctcgtgcgctggtattgttgggtgctatagaaccaatgacgattctttgtgcccgtgaattccagaactcaatcaatgattctgttcttgccctgcttgaggcacaaatcattgatcttggactgtcccacttctataaggtcaaaaacaacgagattgaaggtcagaacggcactcgtttcacgtttaaaggtcttcgcaacaatattcaaagcatcaagtcgatgcatggcattaagatctgctgggttgaagaggctcagaccgtttcgcaagatagttgggatattcttgggccaactgtacgtgctaataaatccgaagtctgggtttctttcaaccctcgcgaggaagaggacccgacatacaaactgatgacccggcatcaggaagatccctctgacggcggcgttattattcgaaaagttaactattgtgataacgcctttttccctgacgtactccggcaggaaatggaatattgcaaacgcatcgattatgaagcgtatgagcatatttggcttggattaccaaaagcactcagtgaagcggttattttctctggaaaataccgggttgaagcattttctgatgagctatggctagaagccgaccggcttttctatggagctgactttggtttcgctaatgacccatccacactggttcgctgcttcattattggtaccaaactatatatcgaatatgaagcctatggggtaggcgttgaattagatgaaatgccccagttctatgattcggtgccgctttctcgtaaatggcccattcatggggacagtagccgaccggaaactatcagttacttatcacgccaggggttcgttatcgatggtgccacaaaatggcccggaagtgtcgaggacgggatcacttatcttaaaggctttgaagaaatcattattcatgaacgctgtaagcacatgattgatgaggcaagactctattcatacaagactgaccgactgaccggtgaaatcctgccggtggtgctcgacaaacataaccatttatgggatgcggtacgttattcgctggatggttatatcacaggcaaaaacaacccacttcgtatatctaaaaatctgttgggcgaatttaatgtttttcaaattcagacataa

SEQ ID NO: 10399 - DNA, 1506 bp, Photorhabdus luminescens
atgtttttcaaattcagacataaaaagaaagcggaggttttgccagttgaacaggatattgatcaagcatcacctcagccaatgaacatacatccggatactgtcggatcgataacagagagaaaagtagctcggcctgttgaaccatacaggccccctcccggtgttgttcctactgaacagttatccgcattaatggcaatggattctacaccttatgaatatatgacgggtacaggtggtatatcgggagatgtgggtttccccggttatccttatctggcccaactgtcacaattacccgaatatcggaaaatggtcggcactattgcaggggagatgactcgtaagtggataaagctaacgtcagtgggggataatgacaaatcagataaaatcaaagcgcttaatgaggctattgaaaaattccacgttcgtgaacggttaaaaaaagccattgaacatgatggtttttttgggcgaggtcagatttacattgatgttcgcacgtcaagaggcgtgcttgctgcaaccgatccggttgaacttgagtctagattatttctgtcacccaaaaaaatcacaaaggggagtcttattggctttaacgtcattgagccaatatggacatatccggggatttataacgctagcaacccgttgagcaatgatttctataagccgtcaagttggtatgtgatggcaaaaactgtacatgacagtcgtttgattacatttatcacccggccattaaccgatatgtttaaacctgcgtataatttcggcggcttatcactgactcagattgcagagtcttatgtacaaaactggtataggacacgtgatagcgtatctgatttgatccattcattctctgtgtctggatttaaaaccaatcttcaatcgacgttgcaaggacagacgaagaatcccgatcagttaatttatcgtgcagaattgtttaacaagatgcgtgataaccgaggggtaatgatgctggataacgaagaggagtttttccagttcaatacaccgctaagtggccttgattcactgcaagcccagtctcaggaacatatgagttcagtcagtagcataccgttagtgatttttacaggtatcacaccaagcgggctaaatgcgtcatctgatggggaaatccgtgttttctatgacttcattgctaccttgcaaatgttagtgaaagatggattggcacgaatgattgatattattcaattatccgaatttggcgaaattgatcctgatattagctttacattcgaaccgctgtatcaaatgaatgatgaacaaaaagccagcatacgtaagaccgatgcagatactgattcagtattaattgctgcaaatgtgattagcacagatgaagctcgcgaacgtctagccaacgatgaaaacagcccgtatcactctctggaaatcaatgatgaaatcgacaaagaagacgacatcgaagaagagggcaacacggaaaacatcatctga

SEQ ID NO: 10400 - DNA, 732 bp, Photorhabdus luminescens
gtgtggtacagcaagcagttatataagctggtggatgagatgaataactcggtgatttactgggtatccgccaactataagaacagcggtgcagcaatggcaatggatgttagcccggagatgttgatgcgttcagcaatgcgaaaattaacccggcgttggttaaagcagtttgatgctttagctgacaagctggcgaaaaaattcgcggctttatcaatggacaacatggatgcctcgttaaatcatgcgttagatgcggcacatatttcgataccgttcacgatgacgacagaaatgaataacgcgctacagacggtcattggtgagaatgttgggttgattaaaagtattccacggcaatatttatcccaagttgaaacgctagtgatgcaatcagtagcaagggggcgtgatcttggaacgttgacaaaagccttgcaagagcgttacgacattactaagcgccgagcagtcctgattgctcgtgaccagaacaacaaagcgacttttgttatgcaatctgcccggcagcgttcaatgggttttaaaacgggtatctggcggcacagtcatgcagcaaaaaaatttcgtcaatcacacttgaaagcggatggtaaagagttcgatttatcaaaagggctttatattgacggaaaatggatcatgcctggtgaagaaatcaattgcgggtgtggttggcaggtcgtcattcctaaactaaccaattaa

SEQ ID NO: 10401 - DNA, 1326 bp, Photorhabdus luminescens
atgaatcacggtctggcgttagatcgggcttctgtacgctcatacgacagagatgggcgtttgcatgttactgaaagtcctatctctaaggcgacggtatcatcgtattacggaagagaaatcccgaactggcaagggttaaggcttgatcctaatcgtatctacaaactgttgcgtgcccctgatgaattagagaaaggggttgcaactttcaataacctgccgttattgaaaaaacacattcccgtcacggcggccaaaccttcaacagaattgattgtcggtacaacgggatcagattccatgttcgatggtacatacctgaaaaacagcctggcaatttgggatgctgaatccatagcgggtattgaatcggatgaacaaaaagaattgtcagcggcgtatcactacgtcgctgatatgacccccggcatgtatgacggcattcatcatgatggcgttatgcgcgatatcgtcgggaaccatgtcgctcttgttgaagaagggcgagtcggtgcagatgttgttgtctgcgattccctccctctggagttaaaacacatgaagttaaataaaaaaatggtggctgtcgctgtacgtgcggcgctgggggcatacttgcagccgaaattagcacaagatgctgcaccaaaagaaattgcctcattactgaaagcgggtggtagcgcgaaaagtatagcggaagcggcgaaaaacaaattcggtacccttctggctcaggatatggaaatcgactcagcggagcttgcctcaatcattgaagctgttgctgatgatgcggagacacaggagcctgcggagttacccgcgcaggacgatgatatctgtgcacaagtacttgaactgcttgcgggtaaattgccagaggaagacttggcaaaaatccgggcgttaatttcaggcactcccgcgcaagacgatgatcccgataataaaccagaaccaaaggaagaggatagcgtcagtaagcccgcaatggatgctgctattcgtgcagctactcgaaaggcagaaaaagacacagtgaatcgcattaatgctattcgcattgctgaggctgaggttaaacccctcatcggtgatgtagtagcaatggattctgctgacgaaatttacaaggttgcgcttgatgaggtgggtgttgatacaaccggcgttcatccgtccgcttatcgctctttagtgaaaatgcagatcggcatagcagagtcagcaaaacttaaagcccacctagcaatggattctgctgctatagattcttttgaaaaacgttttcccaccgcatctaaattagtgaggatttaa

SEQ ID NO: 10402 - DNA, 477 bp, Photorhabdus luminescens
atgggttttccgaacaaaattaatcactatccagcccccggcattgagggagcatttgccagtactaaccctagcgccactttgttagcaagggacggcacgctgattgcgggtaacgatggagtaactgttgggcgttttgcctgggtgattgatggtgttgtttcgaacaagggggcgggtgcaccgtctggttttgtggggcgtgacggacaagcgtctatcactctttggttgggagaagcatccatgctgatccaacccggacgtgaagtcactttatttactgcgggtgattttacggtacgaacaagcactcccgcaaaagttggggataagatttacgcatccttaaaaacgggtgaggtgcaggccgccgcagcgggaaaaactatcactgattttatcgaaactaaattcgttgccggtactgctgctggtgagagtgaattagtcaaaatggggacctggagctaa

SEQ ID NO: 10403 - DNA, 909 bp, Photorhabdus luminescens
atggtgactgtgagtaatgccggtgttcctgcgtatctgactaactatctcgatcctgagctggttcgtgtgttggtcacgccgatgagagcggctgaaattatcggtgaaaataaaaaaggtgactggacaacgctgacaacccagttcccggttgaagaatcaacgggtgaagtgagctcatacggtgatcacagcaataacggcatgtcagatgctaacgtgaattgggtggaacgccagagctatcatttccaaacatttactgtctggggggagcgtgagctggatatgtacggtacggcccgtatcaatcgagcagcgcaacttaacaccgcaagcgcattaaccctaaacaagtttatgaacaagtcttatttctatggtattgcggggcttaaaaactatggactgttgaatgatccggggttaagcgcaccggtggtaccggctgcaaacggaaaatccaatggtacaacgtgggaaaccaaagacgggcaggcaatttatgacgatatttcccaacgcctatttaagcagcttacaaaacaaacagaagggttggtggaacgaacagagccattgaaactttgcatgtcgccaacagcggaagttaatctgacaaaaactaaccagtacaacgttaatgttaccgatcaattgaaaaagaattttccgaatctgacgattgaaacggcggttgaatacagtacggaagcgggggaactggttcaattgattgctgatacgcttgatggtgaaaaaacggcttatgcctcatttactgaaaaaatgcgggcacacgcggttgttgtgagctcatccagttttaaacaaaagaaatcagccggtacgtggggtgcgattattcgttatccacacgctattgcacaaatgttgggggtttaa

SEQ ID NO: 10404 - DNA, 327 bp, Photorhabdus luminescens
atggtgacagtcattgtggggtgtaaattgcctcacgggttaacgattgaaattgatgggaatcgcgtgacgctaaacgggataaattcatcaacaattattggtggttatgggctgacatatgatgttgataaagcgttttttgacaaatatctggaactctatgcagatacggaattagtcaaaaatgggcttatttttgcccaagaaaaactcaaagaggctcggacggaagctgaggaaaaagccgggttaaagaacgggttagagcctatcgatccccaaaaaccgggtaaaaatatcgagcagcgaaaagaagaggattaa

SEQ ID NO: 10405 - DNA, 450 bp, Photorhabdus luminescens
atgggctttgttgtcgtttttgatgtcgtgaaatttcgcactcgttacccggagttttcttctatcagtgatgtcctgctggatacctattttattgaagcaacactctatcttaacaatacggcccaaagcccagttagtgatcttgaacaacgaatactgttgttgaatatgcttgttgctcatattgccgaacttaatcgtttatctgttagcggaacagcggccaatccgctcgtggggcgggttagcagcgcaagtgagggatctgtttccgtttcggctgatatgggcgttgtgagtgaacgtgctgcttggttcttgcagacaaaatacggggctatgtactggcaggcaacagcgcaatatagaattatgcgttacgtccccggcagctctccctctcactatccgtcatattactatccacggactcaatggaggcgctaa

SEQ ID NO: 10406 - DNA, 459 bp, Photorhabdus luminescens
atgtcgaacagtatcaagggcggtgatgcagcaaaacgctacttaaagcaattagctaaaagagtgggtgaaggccaaaaattgcgggttggttttttcaaagacgcgacttatcccgatggcacctcagttgcaatggtggcaattagtaacgagattggcgatccgaggcgtaataggcgaccccgtccgttttttcgtaacactatcaacgaacatgctaatgaatggggtgatgtgcttgcacagggcctgagtgctaacgatatgaatggggatgcagcgttacggatgaccggggaagttatcaaggggcaaattcaacaatctattcgttctttcacttcaccggctaataaaaaatccactatagctaaaaagggatttgatgcgccgctacgtcacaccaaacacatgctgaacagtgttgattatgtgattgatgaggggaacgaatga

SEQ ID NO: 10407 - DNA, 372 bp, Photorhabdus luminescens
atgaacctgcacaatattgtatctggtgctgttggggttgttaatcctcactcacctggagagatacgggtaagtgtgggatatgatattgcacccagtggtaagcaagtcccgcgctacattacaacacccgttaccgcacaaatccagccactgacttttactgatctacaacatacgaacggcttgaatattcagggcatgctcaaagcggcttatgtgaatggcaattttaatgccgtcaaccgccccagacagcaagggggtgatctgttgattattaatggtgaagagtggttgatagtgcagattttggaagagtggccgaattggtgcaaattcgctgttacattgcagcgtggggaacaatag

SEQ ID NO: 10408 - DNA, 582 bp, Photorhabdus luminescens
gtgcaaattcgctgttacattgcagcgtggggaacaatagtggtgacgataagtgtaacgcaagacgatataacaaccgcattacgcggttttttaatggccttaatacccaggcgtagcgttattttgtctcagataaatcgctcaccgatgtcagatggcgattttattgttatgacaccattgaacagcacgggtttatcaacaagtgtagtgatctataacgcaccaacagcggcaggtatgggaaaaagtctaatcactcggacgacacgctggacatgtcaaattgactgttacggtcagttcgctcatgaggatgctcacattattgcaacgacggtgcgcactgaatatgcgattgagctattcaagagatcaggtatcgatatggcaccactttatgccagcgacccgattcagacgacgatgattaatggtgaacagcaatatgagtcgcgttggacatttgaatttactgctcaaatcaaccctgttgtgacaacagaacaactattttttgacagtattacgctgaacactaaaacagtggagtctattcatggcaattccaatcagtaa

SEQ ID NO: 10409 - DNA, 1488 bp, Photorhabdus luminescens
atggcaattccaatcagtaaagacgtgagaattaatccgggggtgctgtcggcagtgggtaatgctgttgatctcaatggattattactgacagataatatatatgcacctgttggtgtggtgttgtcgttctcgactaaagaggatgtggcggcatatttcggtggtgcatccgaagaatatagcatggcggctatttatttttcagggtacaacaattgtacaaagacgcccggtcaattgctgttttcccgatttaatcgagcggcagtatcggcctggttacgttcaggttcttttaatgaggtagctattaccgatctgcaaaaaatgtccggtacattgaaactcaatatcaatggtacagcaataaacgccgcaatcaatcttgatggggttaaatcctttgcggatgcagcaaagagcattgaaacagtgattggcaaggcggtaacggttgtgttcgataccacccgtaaagcttttatcatcaatgttgcctctggcagcattaaaccggaagatacaaatatcacctatggtactggtgatggggccgaggctcttaagttcactggcgcactaggggcaacggtttctcagggggctacagtgtcggcggttcctgatctattcgctgtgattaaaacgcagtctcagcaatgggcatgttttacgacggtatttgaatgtacagatgaacagcatcttgcattatccgcgtgggctagtagtcaggtatatcgctatttctatgttgcctggacaacaagcggcacggcaaaagtgaaaggcagtcaggaaactatcgcccataaaattattggcattcacagctacgggagtgtcgttcctgttttctgctctgataatatgaaaccggcagcagtattgggttatgcggcggtgctggattttgagcgaactgaggggcgtgttccgtttaaattcagagaattgagcggcctcagtcctgatgtgatcgattctgatgtttatgatgcgctgattgctaatgggtataacttctatggcaattatgccgccaataatatcaccgaaaattattgggctgatggcacaataaccggtgattttaagtggctagattccttctgtggtcaaatctggctgaatgcgaacttgcaaggcgcggttattgccttgttcaaatccaacaagactatcccttataacacggctggccgtgcgctggtggaagcctcaatgagtgatgttatccagcggtttaagttgtggggcggtatccgagcaggcgtaacattatcggctgcacaaaaactggaaattattaacgctgtgggatctgatgtttcaacgtcaataatcgcgaagggttattacttgtatattggggaaatgtctgcctctatgcgtgcaaatcgcaccagcccaagctgtacactgtggtattgcgacggtggcagtattcagaaattcgaaatggcatctacggaggttcaataa

SEQ ID NO: 10410 - DNA, 438 bp, Photorhabdus luminescens
atgtcagacacaatcacttctgctgatgcggtaattaccctgactgtgaccaatttatacccgtctggtgtgcaattacagggatttgctgccgacaacattttcgaaactgaggcgttggatttggctgaaacggtacgtggggcggacggtaaactgtcagcgggttttatctacggcaatatcaatcagacgattcatattatgcctgattcggaaagtcgcaccatttttgatacctgggcaacgacatcacgtactagcgtctcggtgttcagatgtaatgcgacggttattcttccagccatcgggcgtaaatacacattggtgaacggcgttctgaagcaatggaaaaccatgccggacgcaggaaaggttttacaagcggcgcaggccgtcattgagtgggaatcaataacaggtgaggcatatagctaa

SEQ ID NO: 10411 - DNA, 408 bp, Photorhabdus luminescens
atggcacgtaaagaaaccttcatcactatgaatgatgataatcgcgacaaaggaaagcttttttacattcaggaaatgcccgcttcgcaggctgaatggtgggctattcgtgcattgatggcaatggggagagaggggttgtctatccccgataattttcgggatttgggcatggctgcattagcggtggttggattgaaagcaatttctcgcattgctcctgatgaagccaggccactacttgatgaactgatgggttgtgtgcagatggttccgaatcaggtagataaaaaaatcaaacgcgagctgatcgacagtgacattgaagaaattgttacccggctgaaattacgtgcagaggtgcttaagttacacgtggattttttcaaaaccgccgaccaatcgtaa

SEQ ID NO: 10412 - DNA, 2121 bp, Photorhabdus luminescens
ctgatggcaaacattatagatgaacttgttataacgctggggcttgatgcggctgaatttagcgcaggtgaaaccgcagtgattgccgggatcggtgggttggctcaggttatgcaaaaactgattgactcgtttaatgatggtgaaaagaaaaccagcaaatcattagacaaaaccggtaagaaaaccgaaaaagtggcaaaagaaatggaggcggcaggaaagaaagcttcctctttcttttccagcataaagagtcagatcttggctttggcgggtgtcacggtctcactcggtggactgaaaagttttgtgaccagttttgccggcaatctcaatcagttaagtactgccgctgatgcgttcggcatgtcggctaaagcgcttgatggctggacaaaagcaggtcaagcatttggtgtcagcgcaaatgagattgtgggggcattttcacgcattaatgatgctaaagcccgactaaaatcaggtgttgcgcttgatccggctcttgagacgctgttaaaaacggcatcacaagcgggtgtcgatattgatattgcctcagaaagcaccgaatctatcatgcgtaagctgagcggtgtttttcccagacttaataaagatcaacagcaagcttacggtggtgaacttggggtcgggtacgccgcgcaacagtggttctcatccggtcacgtactcaaagatgtggataaatttacagctaattcgggtgtggatgataaatctgttgccgccgcgcgtcgttttcgtgaacagtggacagagataagccagagttttgagaaaacaggctacattctgtttaatgcccttttaccatatatcaatgatttcaatatctggctaaaaaacctagctgattggatgaataagcacccagaagagattaaaaaagcggtcagtggttttctcgataagatgagttttattatttcagtcgctaatcaggccgcagatgcggtaggcggttggggtaatgtcatcattggtctgatcgggttgaagtttgcggggtggttatggggaatttatcgcgtggcttcgtccatgctgaaaatggggaaaggcggcgggttaccgggaaaagggattgccgggaaagccggaatatatggcgctatcacatatgcgttatatgatcctgtggagtcagttgcgacttcgattgttggggaagagacaaaaaatacacttgattcatatggattgtatctggcaagcgactggacacccttttttagtaaaaaagagtatgaagcctatcaggcaaaactggatggtaaaacctctaagccagatacgaccgtagtcaaagaggtcaaaaaggaagaaaagcgcagcgaaaatgaccgtatcattcgggccgaggatgaacgacaacagcggctagaatacagcaataattggttaaaagccgcgttagataagctgaccgattcaattaataaactgattgattcgctcgttcctcaagtcgcagccgctgaaatgtcaccgaacactaccggcatgaaattactgggttggctatcaccaaaattagcacaacttgagcagcagttcgggttaccggagggtttgttacgtagtgttgccatgacggaatcgggaggcaatcagtatgctgtgtctaaagcaggtgccaagggcttattccagtttatgccaggtacagccaaacattttgggttaatggatgatgatgtttttgatccggtaaaatcttcggaagccgcggcaaaatatttatctcagctaatgagaatgtttgacggagatttgagtaaagcactggcggcttataactggggacagggaaatgttatacggaaaggattgggcgctgcgccaaaagaaacccgcgattatatcccaaaggtattggcgaatatgccacaactgggggctcatgtggccgctcagcgttattcgaatacggtaaataacaaccgtacctcctctgtttctgagagttatcacatcggaactattcaaatcagctctaacgctaacaacgtaaaaggcgtggttaacgatgcccggcagaaaataggtggatcaacgctggcaacaagctattcaacgggggtaactggataa

SEQ ID NO: 10413 - DNA, 822 bp, Photorhabdus luminescens
atggcattctctctcaatcaaacaacggtacttagtgcgttccgtagtggcaacctgctatctggtgttaacagtatgatatctcctggatatggtatttattatgcatccgggcagagagttggtgataagccgtttacgcccacatcattcattgtagtagaagtcacacgagaggcatcaatcacgactgcgccgatagagaaaggcggctatacatcatacaacaaagtgcagcggcccggtgaagtccatgtgacattctcgtttgagggatggaccggtttttctggttccgtgcctaacttaacaaacctcaccctgacgtcccgttctgatgttcttgaagcgttagataagatggtatccagtgctgaaatttacgacattgaaacacctgatactacgtacacaagttatgatttgattaagtacgattttcgaataaggcaggataacggtgttaccttactgattgtgaccgcagttttccaggcggtacaagacattgccgaagtgaaaatgagcagcaatgttgctaacaagtcgaatacaacaaagaatgagacagcaaaaggcccaagtaaaaataccgaacaatcaacaggttcaacaaaacatgccacactatccgatgtcaaaaaggctctgaccggattgaaaaaatccgtttccagtgctgcaacgcaagttgctgataaagtttcatctggtttcaagcgtgcaacagagacgattactggtccattaaatgattctgtattgagtgccaccaaccatctcaatgatgcagtagaagaattatcgaggaaattaacgtga

SEQ ID NO: 10414 - DNA, 306 bp, Photorhabdus luminescens
gtgattgaaatagcgatcagggcggctaaggctcaggagttcactgtgaccttgaatgagcagtcatgcatgatacgcctcaatcaacgtggcacaggtttatatatggatttaaccgtcaatgataaacctgtgctacagggagttgtgtgcctcaactgcaataaaattgtccgttacagttatttacggttccagggtgaattgttttttgctgatctggatggtttatctgatccccattgggaggagctagggcaacgctacaaattatattacctttttccaggagaggtgactcagtga

SEQ ID NO: 10415 - DNA, 897 bp, Photorhabdus luminescens
gtgacgtacaaacaacacaatatcacagttgaatttcagctagttgacggcaagacatttgatgatagcggtaacaatatactgactatcgaaaacgcacgcgcttatgtcaacatggcggcgtggggcggcatatcagggacacaaataacattacaaatctggggtttaacaaccagccaaatggcaacgttgagttatcgcgggatctggattggtagtgcgaaattcaacttaatgcgtgtatgggcggatggtcatgctatatttgagggttttatcagtgatgcctatgcagattttaatcagttacccgatactcccctgacgataacggccagtatgatgcttggcctaagagcaaaggaagttgaaccgttcactgcatcgggagatgtggatattgtcgatattattactgcaatggctaaaaaagcggatctaacggttgaaaattatggcgccacaggtgttatctcaaatcctcattatacaggaaacgttgttaatcaaatccaacaggcggcaagtgcgctagatatagacactgactttgggattgataaagtgaccatttggcctcatggtcaaccgaaagttgaaaaaccgctacttacgtctccagaatatgggctaattggctatcccatatttactggcgtgggaataacagcaactacccttttcagtaatgaaattattttaggtcgtaaggtaaaaatagaaacctctttgccgaacgttagcggcacttatctgataacaggggcggaacactaccttacctcctggcttgatggtggtcagtggcatacatcttttagtggcactccagtgaaaacagaggataaaaacaatgacaaagctgacaacaaaaccaacggacataaacagtga

SEQ ID NO: 10416 - DNA, 537 bp, Photorhabdus luminescens
atgaggcagtttcttagtcagcatgtttttatcactttgggccttgttattaaatcgagcgggaaaaccgtagatgtaaagccgatggtacataatatgacgggagcagggagaaaaatcgagaatggaataatctataatgttccagtatttcgtcttcagcgtggtaacagtgctgtcattatgaatcctgtggttggtgatattggtttaattgccatttgtgatcgtgatattagcagcatcagagcaacaaaagcaccggcattaccgggttcaaaaagaacgcacaattattcagacgcaatttatctggggggagttttaaacgcagaaccacaacaatatgttgaattcgtagataatcagataaatattgtttcaccgaataaaattaacgtagtcgctccgacaacggaaatgacttcatcaaattcaatcacaatgaactcaccatctattatattaaatggtgcggttattcaaggtggtggcggtaacggtggaaatgcaatattcgatggaaccgtaagatag

SEQ ID NO: 10417 - DNA, 534 bp, Photorhabdus luminescens
atgtttaatcttgagcagatcgggcatgtggtaagaaatagcatgcagattattgttgatgagcttaagcttaaccttgctataggggatatctctgatgatgattacagaatcctttctcgcggatacggcgaactaaactgggatgaatgtttgtctagggtaggaaacagagaagataaatttgaattttgcttaaagctggtagaatgtggaaatgtgcaaggacctccttctgggctagctttatgtacatattccattgatgaggaaagttttgaaattcatatgatagagaacttctatcgtgatgacgcaaaacaccctttaaatgggaaaatgtttcaacttactctgatggctgcttacatgttttgtaaatctgcacagggtaaatatatccgtatcattgagcctgttgaagaagtaatctcctattactcatcttatggatttaacatgatgaagtgtggttacattatggaggctgatattgatacgtttgaaacaatattcaagacaatcaaagattga

SEQ ID NO: 10418 - DNA, 174 bp, Photorhabdus luminescens
atgtcaaagcagaaagcagccattaaagatatcaaaaaatttgatacgcagcaggtgtatactgctgtgggtggagctattgacttgttgataaaagctgccccaaaaatgtttgagcataagccaaaagttgagcttcaaggaaagcgtaagaatcatcgtcaagctgcttaa

SEQ ID NO: 10419 - DNA, 357 bp, Photorhabdus luminescens
atgcaaactcgttcatttcttcttgataccgagtcatgggatttaacgttagatgattctggaaatatcgccattactgataatccctattctgtagcgcaggatgtcgcttgtgcctgtagtacatatctgggtgagtgctggtatgacacagcattgggtattccttattaccagcgaattttgggatattggccgggaactcagctaatcaacagcaaaatgcaacaagaagcaatgaagtcaccttatgttcagtctgccacttgtaaagttataaatggaaaggagagaactattgcgggcatgatgacaataacggacatgaacaatcaatcaacggtggtaaatttctga

SEQ ID NO: 10420 - DNA, 1176 bp, Photorhabdus luminescens
gtgcccgacgaggttgatattttaaatgggcggctaaatgatttggctacagcaatgggtggtgcaatgagtacgagcttaacaacaccgcaaggtcaaatagccatgagtgatgcggctatcattgctgacaagaacgatcagttacttgctatcgtcaatcaaattaatccggattatgcaaccggacgttttcaagatgctatcggacgaatttattttttagatcgaattccagcatcgggaacaacggtaacagcaacatgcactgggttagttaatacagttattccaattggtagtattgctcaagataaaaaagggtatctttatcattcactaacagaggttaagatcccgggcagcggctctgttgatgttgttttccaaaactcaacatcagggccgttagcatgccaaattgatgacttgaacacgatttatagctcggtgcccggttggtcaggtatcagtaatgcgagtgctggcgtacctggcatagatgaggaaacccgcgctaattttgagtatcgtcgtaaacaatctgttgctaaaaatgcgacaaactcattacatgccatttatgccgcagtattagaagtaaatggcgtggcagacgcatacgttatttcaaatgatacatcggtagtaaaaacggtcggggtatcaaaatacagaatggtgccaaactctatttatagtgctgtatatgggggaaagactgaggatgtcgctagagtaatctggaagaaaaagcctccaggtattcctacgaacggaaatacaactcacacaattgtggatgatgaaaactatgttcagccttatcccgaatatgaaattaactatgtgataccagcacccattcgtgtctatgttgacgtctcacttgctaatagcgattaccttcctgctgatattgaaacacaggttaagtcagctatagcgcaagcatttaacggagaagacggtggaacccgagcaagaatagcatctacattatttgctggtagatattattcaggcgtttataacatagatacatcgagtgttgatatttacaatattacgcttagccgtgacggtattacttattcaacatcaattagttttggtattgatgaaatcccaacgcttgacgttgataatatttctgtgaaattagtaggttcataa

SEQ ID NO: 10421 - DNA, 606 bp, Photorhabdus luminescens
atggaaaatgtgggagcaactattcttgctcagtatgccgctagtccaaaactcaactcacttattcgaagtttcaatgccgctgtttcctctgttgaatttattaatacattttacgatctgatttggaatattgacacagaaaatacttacgggctggatgtgtggggaaaaatagtgaatgtcagcaggcggctgactgttaatgaaaatgtaaaatatataggttttggtgaagctttactgaatgttccgacaacgatagatccaaatccatttgaccaagcaccattttattccggggagtcaaaaacaaaaactattgagctatcagatctgatgtaccgaaagctaattatgatgaaagccatgtcaaatatatctgactgcactataccaaacatcaacagaatgcttgtttatatgtttagcgatagcggacgtgcatatatcactgatgatggaaatatgaagatgagttatgtatttgaatttcagctatcaacagcagaattagcaattgttcaaacatcgagagcactgccttacccggttggtgtcagtgtcgcaatcgttcaaaggataccaacaaatgaaatcaactga

SEQ ID NO: 10422 - DNA, 1344 bp, Photorhabdus luminescens
atgaaatcaactgaaaaacctaatcttattgctgttccgtttgcgagcgccggagactataacgagattgcaacaaaatcaactgaaagcagcttggcaaaaggagtagctacgtatccgagcggtttccccccgttaacgatgacagcaatatctgctggtggaattcctccatctggcaaggatatgaacgggatattgaatgatattactaccgcaatacgttattcaatgtctggtggcttgtattcgtataatgctgactttagtgctgccattgatggttatcctaaaggggccattgttgccagttctgatggaagtaaaatttggtggaatgaggtagaagataacaatacagatccggatagtacatcagtttccggttggaaaaatctactagcagatcctaatgggttatttctacagaaagctaataacttatctgatattaataacaaagcgacagcacgtaataatttaggactgggagagattgcaactcaagatttgattcctgacgccacacttatagaaaaaggcatcacccaacttacagacaagacaggtaacagtaatacccttgcagcaactcagaaacttgtttctgatgtgaatgataatgccaataataagctcgctaaaaatcaaaatggagcagacatcttcaataaaactgaatttgtaaaaaatatcggtttatcggaaatggtggagttggctaaaggggcggtgccgaatagccggaaaattaacgggaagccgttggccggggatattagtttgaatgctggggatgtgggaagttatgctaaatctgagagcgataatactttcttacgcatttctagcaataaaaccgcaaccgttggcagtttactgattgacagtaaaactccttttcctaaattgcgtttcaaatcgaaagatggatatatattgggaattaacggttctgaagggaaattgttgcatatctattctgacgatcccaagaatcagcggcgttacaatatattagcgcctgagagaagtggtactcttgcattacaaaatacagctataaaatccgaaaatggttggtggcaatgtggagatacgggggtaattattcaatgggttaaagtcccatcagctcaacaatcatggataaaggtaaattatccaatttcttttaaaaataagctttttggctatattgcaagtatgtcgagtatcaatacatcaactggccacacattagtacgtaatgcaacactatcgacatttgaatatcaagcaggtactcccaacaatgatgagaatccaggcaaagttgtacatatattattttggggggtataa

SEQ ID NO: 10423 - DNA, 447 bp, Photorhabdus luminescens
atggtctatttctccagaaaagaatgtgttttttataatgaagctcatgaagagtgtgttgaaataacagcagaaaaacacaatgaattacttgacggtcaatcacgcgggtttgctatcgtcagtgataaagagggttatccaattcttacagaacaagcacagtctgtttatcacaagtgggatagtgaaaagtggataatatcagaaagtgataaaataaagctcagacgggaacagcagcagcaagcagaacataagaaacagcaacttatgctcactgtaagtaaacagatcgctccgttacaagatgctgtagatttggagatgtcgagtgataaggaaaaatcgctgttagcagagttaaaaaaatatagagtattattgaaccgcgttgatgttaatttagcgtcagatattaactggcccgaaaaacccttagaataa

SEQ ID NO: 10424 - DNA, 285 bp, Photorhabdus luminescens
atggctaaacgcgataataaaacaattcgccgaatttcccaagctgaacgttttggcaaggtagctaaaaacggcatttctttaaaaggaaaatggttacaggaagcgggatttacctttggaatgccactaaaaatccgggtgatgccggactgtattgttattaccgcccagaacactcaggaactctggcaatgcctggaaggactgagtattgagccatttaaccccagtgctgctattgactggattaagtattatcctggtgggttgatgattacctaa

SEQ ID NO: 10425 - DNA, 186 bp, Photorhabdus luminescens
ttgaaacgtataccgccagaattgtttaagtctgaaatgaaacgaaaaggctggacgcgccgcgagctggctatacggtggggcaaatcagaaacatggatcagcaaaatagtgaataatatagaacgggatcaacactggaatgacgccctcaatggactgcctgacaacgaaaagcccaggtaa

SEQ ID NO: 10426 - DNA, 483 bp, Photorhabdus luminescens
atgacaaagaaaaaagcacacaaacccggttcggcaaccattgccatgaatagacgagctcgtcacgaatacttcattgaagaagaatttgaagcgggtctctcgttacaaggatgggaagtcaaatcactgcgcgctggtaaagccaacatcagcgacagttacgttttgctcaaagatggagacgcttatctttttggtgccaccatcaccccgttaaatgtagcttcttcccatgtcgtctgtgatccaatgcgttcacgcaaactcttacttaatcagcgcgaacttgactcattatatggtcgagtcaatcgtgaaggttataccgttgttgccttatctctctattggaaaaacgcttggtgcaaagtcagaattggcgtagcaaaaggcaaaaaggcacacgacaaacgttcggacatcaaagaacgtgaatggaaattagacaaagcacgtattatgaagaatgctgggcgataa

SEQ ID NO: 10427 - DNA, 435 bp, Photorhabdus luminescens
atgccacagattagtcgctctgcgttagtaccttacagcgtggaacaaatgtacaaattggtcaatgatgtcggttcttatccggattttttaccggggtgtgttggtagtcgtgtgttgagtgttagcaataacgaaatgactgcgtcagtcgatgtttcgaaagcgggtataagcaagacctttgttacccggaatattctgaccgataaccaaagcattaatatgcaactggtcgatgggccttttcgtaagttaatgggaggctggcagttcataccattgagtgaagatgcctgtaaagttgagttgcaccttgattttgaattcactaataagctgattgaattggcttttggtaagatttttaaggagctggctggaagtatggtgcaggcttttactctacgtgcacgcgaggtttatcgtgtctga

SEQ ID NO: 10428 - DNA, 312 bp, Photorhabdus luminescens
gtgcacgcgaggtttatcgtgtctgatatcaatgttgaagttgtttatgcattgcctgatcgtcaatatctgcgtacggtgaaattggctcaaggctcaacagttgagcaggcaatagttgcatcaggtttgctgactttgcgtaatgatattgatttgcaaaagaataaactcggagtttatagccgtcctgttaagttgacggatattttggaagagggtgatagggtggaaatttaccgcccattattggctgatccaaaagaaatgcgtcgtaagcgtgctgagcgggctaaaaataatgctcaataa

SEQ ID NO: 10429 - DNA, 348 bp, Photorhabdus luminescens
atgcgctgtaaaatgttgactgccgctgctgtatcatttgtcatgctgactgcgggttgctctacgttggaacgggctgtttatcgccctgacattaatcaggggaactacctaacaccgacgagtgtatcaaaaatccacaaaggaatgacccagcaacaggtagcttacacattaggaacaccaatgttacaagacccgtttgggactcaaacgtggttttatgtatttcgtcagcaacctgggcacgaaaaagtgactcagcaaactctgaccctgacatttgacagtaatggtgtactgactgacattaaaaacgaaaattcacttaccgaagatcttcaataa

SEQ ID NO: 10430 - DNA, 1662 bp, Photorhabdus luminescens
atgctcacccagttaaccattagcaattttgccattgttcgtgagcttgaaattgacttccagccaggcatgacagccatcacaggtgaaaccggcgcgggtaaatccatcgcaattgatgcattaggtttatgtctgggtaatcgtggtgaggccaatatggtgcgtcgtggggcttctcgtgctgatatttgtgcccggttttctctttctgatacgccttctgctcgtcaatggctagaagcccaccaacttgatgacagtaatgaatgcttacttcgccgtacaataacgtcagatggccgttccagaggctttatcaatggcaccgccgtaccgatttcccaattacgcgaattgggtacccaccttattcaaattcacggtcagcacgcccatcaattactattaaataacggccaccaaaaacgcctgcttgatacttacgctaatcaattcaatttgcaaaatgaaatgaaacaggcatatcagcaatggcaccaaagttgtcaggatctggctcgattccaacaacaggcgcttgaacgtcaatctcgtcaacagttactggagtatcacttaaaagagctcaatgaactggcaccgcaaccaggtgaatatccagaacaagataatgaatataaacggctagcaaaccgtggtcagctactctctgttagccaaaccgcactccagttacttagtgacaacgatgaacaaaatattatcagtctgctgaattacgccaaacacgaactggcagaactcatcactatggatgataaattcagtcaattactcactatgttggaagaagcatccattcaaattaatgaagtcagcgatgaactccgccactatggtgatcaactggatatggacccaaatcgtctttttgagctggaacaaaaaatttcacaacaaattagagtggcccgcaaacaccacgttccaccggaagaacttccttcactacatcaacaattattggaagaacagcaattactggcgcagcaagaagatgactgtacccaccttagcgagcaggttaataaacaccataagcaggcattggaagttgcagaaagattgcatctggttcgccaacaatatgctaaagaactcagtgaactcattacgcacagtatgcatcaactcgccatgcctcatggtcgctttaccattgatgtctcttttacacctgaacatctgaacgctgatggttcagataaagttgaatttaacgtcaccactaaccccggtcagccacaccaatctctcgcaaaagttgcttcaggtggtgaactttcccgtattgcgctggcaattcaggttataacggctaagaaaatggaaacgtccgctttgattttcgatgaagtggatgtcggtatcagcggcccaacagccgcaattgtcggccgtctgttacgtgaattaggcgaatctacacaggttatgtgcgtcacccacctgcctcaagtagccggttgtggtcaccaacatttttatgtcagtaaacagactgacggtgaagaaactgaaactcaaatgcaactactggataaaaaagccagattacaagagctggcgcggcttctcgcgggcagtgaagtgacaaaaaataccctggcaaacgctaaagagctactagcagcgtaa

SEQ ID NO: 10431 - DNA, 879 bp, Photorhabdus luminescens
atgaataaaaaattcaaatgcataggtattgttggtcatccccgccacccagaagcacttgctactcatgaaatgctttatcattggttaaaatccaaaggttactctgtcattattgatcgtcaagtagccaaagacattggtttaaaagatgcacaaactggcggtctgaccgaaattggtaaacaagctgatttagctgtcgttgttggtggcgacggcaatatgttgggcgctgcccgggtcctttcccgttatgacattaaagtcattggtattaacagaggcaatctaggttttctgaccgacttagatcctgataatgctttgcaacaactttctgaagtattggatggcgaatatcggaacgaacaccgtttcctactagaagctcaagtcagaagaaacggccagaaacctcgtatcagtaccgctatcaacgaagtcgtactccatccggggaaagtggcacatatgattgaattcgaagtctatatcgatgaacgttttgccttttcccaacgttctgacgggctaattatcgcaacgccaaccggttccacagcttactcgctttccgcaggagggccaattctaacaccaaatctggatgcaattgtcttggtaccaatgttcccacatacattgtcttcccgcccactggttatcagtagtgaaagcagcatcaggctgaaattttcccaaaatagcaacgattatgaagtcagttgcgatagccagatagttctacctatacaggatggagaggatgtaattattagccgcagcaaacagaagcttaatctcattcatcctcaagactataattacttcaacacattaagtacaaaactaagctggtctaaaaaaatgttctaa

SEQ ID NO: 10432 - DNA, 582 bp, Photorhabdus luminescens
atgagtagtaaagaacaaaaaatgcctgacgagcaagtctcggaagatatggaagttgtatctgaacagcaaaacagtgcggataaagcagaagcatcagagactgaaagtgttgttgatccgcgtgtcgcagagctggaagaacagctcaagcaggcgcaacagcgtgaacgtgatgccattttgcgtgctaaggctgaagttgaaaatatccgtcgtcgtactgagcaagatgtggaaaaagcccataagtttgcgttagaaagatttgccaatgaactgttaccagtgattgataatcttgagcgagctttggaggtggcagatcgtactaataccgaaatagcacctatggttgaaggcatcgagctgacgttgaagtctttccttggggctgtgggtaaatttggtattgaagttgttggcgacacaaatgttccttttaatcctgaaattcatcaggccatgaccatgatggaatccgatcagcatgagccgaatcatgtcatgatggtcatgcagaaagggtataccttaaatggccgtttgttacgcccggcaatggtagccgtatcaaagtaa

SEQ ID NO: 10433 - DNA, 681 bp, Photorhabdus luminescens
atgtccgcacctctcacatggcacgacgtaatcggtaacgagaaagaacaaccctattttctcgacacactagcctatgtcgcaaaagaacgtcaggcaggtaaaaccatttatccgccacaacaggatgtatttaatgcattccgctacaccgaattggctgatattaaagtggtgatacttgggcaagacccataccatggccctaatcaggcacatggcctctctttttctgtgcaaccgggtattcctgcaccaccgtctctggttaatatgtacaaagagctggcatccgatatacctgacttccagcatccaaatcacggttgcctaatcagttgggctaaacaaggggtgttactactcaataccgtactcaccgtagaacgtggtaatgcacactcccacgcgaatctgggttgggaaactttcactgataaagtcattgccgctatcaatgagcaccgttcaggcgtcgtttttctgctttggggatcccatgctcagaaaaagggctactttattgacgctaataaacaccatgttctcaaagcaccccatccatcgccactatctgcccacagagggttctttggctgtcaacacttttcaaaggccaatacattgctagaaaaacaaggcatcgcgccaattaattggacacctgagttgccacagtaa

SEQ ID NO: 10434 - DNA, 1017 bp, Photorhabdus luminescens
atgagtttatcaattgaaatgaatctatcagtcgattcaagttttcccgttttaaataatcttcaacttgttacaccgccttctgttccagaccaaaatattgaaaaagcgactacagaagttttttccctctcggaaacgactaaacaaaataatagagtctatcaatcattaattaatgaacagagtattaaccttaatttaaagtcaatcacaggaattaagtctgaacaaattagtggtaagcaatctcatgaaattgattatatgttgaccttaatttctgatgatgtctacataagcaccacgatgggaataggtgattatattcgtctttctgatggtgaattattaaaggcaggaatagaaccggcaaatttaagggataaaacaacaggttttcaggcaggtatttatcggaatgacgatctctatatagtggcttttgtgggcactaatgatttgaaggatatattaactaatttacgacaaggttttggatttgatgaggctcaatatcatcaagcaattgatttagctcgcactgccagaatagcatttggggaaaacttgttatttactgggcactctttgggaggtggattagccgcgacagccgcattatcagttggaaagcctgcggtaatatttaattcagccggtgtttctgacaatatgatgaaaaatttgggtttttcaccccaagagggtagggctatcgctgaaaatggattggtgcgccattatgttgtggagcatgatttacttgatgcattacaacagaaactgccagtatctcagccaataggacataaaatcttactgaaatataatgatgattcaggagagtcaggtcaggggtttcctcataatctgatacgtggattaaaagcacattctcttgaaaaggtgctggaattattaacgatatacaaaccttggtcatctttaaatgatgaacagcaagaagaatctctagtcatgcttaatgaaccggatctgagtgtttctgcataa

SEQ ID NO: 10435 - DNA, 471 bp, Photorhabdus luminescens
ttgctgaaggagggcgctgatcctactcaacctggtttgcaacaagaaagtgctttgcatacggctgcaaaaatcaacaatcctgattatctcaaatctttattatccgtcgcgccggatgtgaatattatgcatcctgcaaccttagcaacacctttacatgttgcggttcaggtagggagaaaaatgcaggttgaattactgttggtcgctggtgctaatcccaatcaggctaatcggattggggatacgccgttacatattgcagccaaaattaattcgccggaactggcactgatattgttgaagtcaggcgctgatcctaaattgcaaaacaaacaacaatcaacgttccagatgtatttcaatctcacaccgctaaaagcgcgaagttatgagatgcaagcggaatatgatgaagttaatcattggctgaaagctcagcaagtcagccgatattatttgaagtaa

SEQ ID NO: 10436 - DNA, 849 bp, Photorhabdus luminescens
atgaatcttataaataaagaaaaaatccgctatgtttttagtcgaataaaaagaaaaggtgttctaaacacaattagtggtataaataggaagtatatcaaatcaaaattcatagagtcatttttatctaagctaataagtagtaaattagatgtgccagatttccctaagattatacaaatagaaacaagaagtggctgtaactattcctgctcattttgtcccacaaataaagtcaaaatgaaacaagggaaaatgcagcaagaactatttgataaaatagtggagcagttaaaagactttaatggttatatcagtttgttttttagaaatgagccattgatggataagagaattatagattgggctcaaaaaataaaaaacgaaacaaatgcaaaaataattattcagacaaatggttccttattaaatgaaacaattgctaaggagcttggtcaatatgctgagttaatagtgaatgactatactgatgataaaatagtattgaagaaaataaaaaaatgggaggagaatattactgataatttaatatttgtaacacgagataattctgaaagcttgacaaatcgtgctggaaatattggtgaaaaaaagaaggtatttctaaataattcatgtgtaaaaccatttactgaactcacaataacattcagtggtactgttgttttgtgctgtcaggattggatggaagaggccattataggagatcttaaccaccaaagcattcttgagatatggaattcaaataatttaaatgaaattagagaacaattaaagaatagaaatagaatcggaatatgtgaatattgtgattttgttggggtataa

SEQ ID NO: 10437 - DNA, 1140 bp, Photorhabdus luminescens
atgatgaatatatttaagataatgcagaagcaagtatccaaatgttatgtaaaagggaatgactggaattattcgaaacataaagatatatatttacattttagtgatgagcgttgttatgaagtagaattgaaggaatgtgcacaattatcttatataaagaatgcagatagtatcatattgttgccgacactatggggacgatgtgataaatctgagatcttagaagcaattcaaagaggaatagaacaatgcatcaaatttaattctgtattaatggttagtattcaatctaactatagtcatagagaagatattattgatagtgttcaaaagcttttgaatgaaaatgaggtttacgacaagttgatattgtttcttacagatatcaggagcaaagcatattcaataaatcaaactgttcttttagcaagaaggataaactgttcagcagttggatggatggatgatgatgttattctatctgatgatgcatttttacaattgtatgaagatcttcgtcgcagagggtttatagggagttctggtgcattgaaatgcccgacaccgaaaaaatatcctacttcaaaatttttgaattttgccaaaaataaaatgtctacaaagaaaacaaaatatccacatggctgttgtatgatggtaggtgtctcatcaataaaaaacttgattcctgccagatatatttgtgatgatggttttttcttttttgaattattagacatgaaattagaaaatcctcaaaataatatgaggatcgtggaagagtctatatgtcaacattatgttggagggaatgtcaaagatacatatttccgtatacgtagatccattattagcactgtagtttattgtgctgattatccattggataagtgcttgtattatttaaaagaagttcagttcaatgggttgttcccagccatgtttatcaatatacctattaaagataagattataaaaagtatacttaaatttatattcttaatatggcatgtaatcatattgattgagttgttttttagaagattttcaggaaatccgttaagagaaatagcatggtctgcatattcttgggaaaaaactgaaagtttgaaggaaaaaaaatctttatttgattaa

SEQ ID NO: 10438 - DNA, 744 bp, Photorhabdus luminescens
atggatatttgtaaatatatgtcttcatgtagaaagtcaataatccctatcctcgatccatttaagtttaattatgaaataaatataaatagattattaacttttcaaaaatatgctcctttttgtataatagctagtacggattgtgaaaactttgagatgaaagtgtctccctttatagctgccgcatcaaagattaaaaccatcccgatcataacgcattttcctcctcagaaaccaaacggatttccttcatcacctcacgcagatgcattttttgccacatcagtgataaattccaatgtggaatactatagctctttatcattagagagagagtccatcaagcagagtattgaaaagtatggtgacaactgtttaatcagttctgctgctcttgttctaggtaatgataaaaagtctcaaaaatttgtttattcaaagactgtagatcactcaacagaaagtattgctagagcattggaaggtatagatttcaatttattgaaggttttttacctttactcaagaaacagcgttatttctaatgaaatatgcagttttgtaaagtttattgttggagataatacactgttgtttgttagtggaggaatatcaaacactgagcaggtaaataacctgttatattctggtgctgattttatttcaattggaactacatttgaagaagtcaattggaataacaatgctataaacatattaaataaagaaagaatatattaa

SEQ ID NO: 10439 - DNA, 531 bp, Photorhabdus luminescens
atggaaaatgtagttttagtcgatgagaatgataacagagttggatgcattaataagatagacgctcatttaaacggtgatcatcttcaccgtgccttttcctgctttattattaattcaaaaaatgaggtatacattcagcagagagcacagtctaaattactctggcctggatattggtctaactcatattgcagtcacccgagaccggatgaagaaatttctcatgctgtgatgagacgtgcggaagaagaactcggtattgtaataaatgaagaaccaaaatttttatataagttccaatataaagaaaaatataaagatgtaggatatgaacatgaattatgtcatgtctttgttgtttttactgatacaccaccaacggaaaacccaaaagaagtatcagcaggattttttattaatattaaagatgtccaagaatatattcataataatgaagagttttgtacgccttggttcaagaaagagtgggcagatatattacagaaccactttgataaattgtgctaa

SEQ ID NO: 10440 - DNA, 1419 bp, Photorhabdus luminescens
ttggtttctaactatggaataaaatcaggttctggaataatgaatactacttggcatgaaaaaaagacaatttataatgatcttaatcaattgcatggagtttatgtcatattgatggaagaatatttatcaacattttgtacaaactttggtggaatgtattcaataccaccgcttgctgttgtctgtgtgaaaaatacagattcaataatagatataattcactattgtaatataaatgagataccaataaatatacgtggtgttgggcattcttttggtacacaatcgctttcaaagggaattgtattagtagtatcagtcgaaaatccggtatttgaaaaaatagatgaatataagtttaaagtttcagcttttgaaacatggttgtctgttgagtgttttttgagaaaaaatggcttatcatttcctatcttgactaggcatcctgatacgactgttggaggaacactttctgttggtggatatggagaagattcatatctatatggcagtcaggcatcatgtattcaatcgtatacgctaataacacctgatggaaaaaggcatagatgttcagaagattcaaattccgaactttataattttggactcgcatcattaggaatacttggtattattgaagatgtgacttttgaagcaattccattaagagtagagaacatactttatgtgatagagtttgatggaattcttcatttactgagttttctgatattgatatctgaatattccaatctgaatattgaagctgtcacatgtcaattataccgaagaaaatactatgttaatatggttctcagcaataattctgatcagattaatattgttaataaggtattagaatgtcaagtgacagggtgtattggctacaaataccattcagtaagagattatagaggaagaacatttggtgcctataggcatgatctctggaatagagactatgttaatctttggggagattattgtgttgatcagaataatattatggcttttgctaatttcctattaaataaagtaattaacaatgacgtttttataagtaataaaggtaggcttcttataattttaaagaaaagtcctagtttaagtaagttctttccttttgagccgatatcgaaaaaaatgagtggaattgtattcggggttggggtgtactttacgtttcctagaaacgaaagcaaagaatatgaaaaattaaagttactgcatagtcaaatattagaagagtgtattttaaatgaaggtcggccttatcttgcgggatggcatgaaatgaaatatgaagataaaataaaaatatatggagatgattatatgaaaattttagaactcaagaaacacttggatcctaaaggaattgtaaataattatgatttttttatggagtattag

SEQ ID NO: 10441 - DNA, 147 bp, Photorhabdus luminescens
ttgcaacaacttgccttgaatcaccagcaccgggacgtccgtacacgagggatgggcttgctcgtgcttgccagaggccctataaacgaacccgaatttgctaaaaaatcgccttgctcaataaagttacggccggagcacggttag

SEQ ID NO: 10442 - DNA, 1110 bp, Photorhabdus luminescens
atgaagaagatattgattatttgcatgagaacttgggggagaatgggaaattatgaagcagcaaaaaaaattgaatcagaactagctagtaaagcatttttttctacagaattaatctgttttgatgaattagtacctgtgttcagcaagtttggattaagaatgcaagagatttctgcaagttactatgatcctcacattaaattgaagctatatgatgagttgatagatgatattggtttgtggattagtaatttcaataatgagcaagtattaaatgaatcattatcgagtgtcattgaaaatgattttccatcgttaattatatcgacgaaaggtgttatcgcaaaaatagtccatgcattcaaagaaaaattctattttgatttcaaaacagtgaacttcataactaatcctggtttgttagatattaaaatacatcaacattttagtagtgatttgacgattagaacgacaaattattacccaaattctgatatggttgaaaaatttcatagactagagactgttccattatttaagccagtttcaaactatcaaatcgatcagcaggacattccttctattttaattctctgcaatggatgtgaagaaggttattttgatgtattaaaaacttctttcgaacatccgtcgaaacctaaaatattcatggttattatttcgaataagaaattgtatgatgaatgcatagatttaaataggaagtatgcagatagagcatgcatttataatacattagctaataaggattatctaaaactgatactagaggcttcaacaaacagcagatcatttctatactccaaatctggtccaaacacagtattggaatcaattagattcaatttaccagttctaatacatttctcagggttaccaatggaaagatggatagtggagttgacaaacaaaagaaaatttggtttttgttttgaaaatcaatctaatgggcctggtataataaaaaaatggttggataatcctgagattgtaactaactttaagcgtaacatagaattaagtgaaattgatgatatagatattacacttaaagatttacctgatataatttgtgatgtcatgtaa

SEQ ID NO: 10443 - DNA, 615 bp, Photorhabdus luminescens
atgttcaaaattgaaaaagcgcctataacaacagtatttatagtatgtgtgacaattgtttattccacatttgtttcatattcattaacagatagctttatcggtaaaataagcattatagaactagagaaatatggagggttaacaccaaatagattatatgaatttgagtattggcgacttctggtttcccagttcatacatgttaaacaactgcatatggtctacaatgtgctatcactttcaatattgggaattttattggaaaaacatcttggatctaaatttttattagttttatggtttatttctggtgctttgggaactctttatagcactaactttgttagttacccttggaatattggtacaggagcatcacaagctgttttgggcgtatcttcctttgcattactgttggtttttgtcaaagagcatacctctagtatattaaagtttgctgttgttttttccatgctgccggcaatcgctttagattttatttatgctcattatcctaagcctggtcatgttctttctatttgtattgggcttacaatgagtttgtttttctataggaaaaataaatcttattttgataatgttgctatttga

SEQ ID NO: 10444 - DNA, 1215 bp, Photorhabdus luminescens
gtgcgtgatatagttttttttcttgaagaatatccagtcctaacacaaacttttatacatcaacagattatcagtttgaagaaagaaggatttaatgtaagagttgtatctgtttctaaatctagtgatacaatctgtgctaatgattctacaatcccctatgtttgtctagaagatataaaaaacattcatcctatatatgcaatatttaagtttatttatttttctataacctctggttatttcttttctcgaatgagtttatttaaacgaaattgttaccgtaagcgcttgctttttaaatttctatccaatccgtcacaaataaaacctaatgatatcgttataagccattttggtatggctagtatcatggcggcacaattgaaaaaatatggatatattaagagtgcactatatagtgtattacatgcatatgaaatgactaaagaaaagagtcttaatgatctgggaaatcattacggaattttatttgagcaagcaaataaaattttttcagtttgtgaatatatgcgtaatagaatcatcaatctaggatgtcatcctaccaatgttgaggtgctacatctggggatcgatattgatgctctttcatgtttatatccaaatgaatctaataaagaaaaaatgaagataatttttgtcggccgtttgacagaaaaaaaaggattgcctgatttattgttatctctagcacgaataagcagtgaagtgtcatttactttagacattgttggcgatggggagctcaatgattattgttatgaattaatattaaaacttaatttgaatgaacatataaaaatgcatggttttcaaccccatcacatagtcttaaattttatgaaagacgcagatgttttaatacttccatccaaaacatctaactctggtgacatggaagggataccagtggtattaatggaggcaatggctatgaaaaagatagttttgtctacctaccatagcgggattaccgagttaattgaaaataatgttaatggatttcttgtcaatgaaggagatattgtagctttatcagaaaaaatatcatatatagacgagttgggtaaaaaagataaaaatattatgagggagaatgcacatcaaaaaataatgaatgaattcaatattaatattcaaagtaaacatttagctaacataatacttaatgaggaattttctgaaggatga

SEQ ID NO: 10445 - DNA, 705 bp, Photorhabdus luminescens
atgaaatatgacattgtctttatatcttatgatgaaccatgtgctgaatctaattggaatcatttgaaaaatagatttcctgatgcaaaaagaattcatggtgttaatggtatcttaaacgctcataaagttgcttctgattctgtaacggctaaatggttctttgttgtagacggagacagtaaaattagagatgaatttaactttgagttaccagtggaacctttatgctcaactgcgacttatgtatggagaagtgttaactcagttaatcgtttatgctacgggaatggaggtgtgaaattatttaataaaaggttgtttcaggatgttaaaaatttttctggagatatgaccatatctcttagccctgattatcgcgtagtcaatattgttgcttcagatacagtcattaacacaagcagtttccattcctggagagctgcttttcgagaatgtataaaactcagtataccaaggaaaaatcctaaagaagatattatatgtaaagaaagattaacggcatggagtttaattgatactcagatagaatttggtgattggatatcaaaaggagctaatgatgctgctcatttttatgaggaaaacattgaaaatatggaattcttgttatcaaccattaatgattttaaatggttaagagatacgtttaatttaaaatacattcagaaagatagagcatga

SEQ ID NO: 10446 - DNA, 891 bp, Photorhabdus luminescens
atgttacggcaagtagcaattcttattcctacttataaacgtagttcatcattattacgtttattgaaatccattgaaaaattagagacatcaaataactatactgccattgtggcagataacgattcttctcagaaagagtcttttaacatgatcaatgaaatcaaagatgattttaatttccatattgatgtcattcttgttgaagataaaaatatctcattagttagaaatatgctgttaactttggcctttgaaacatataagtgcgatgcagttgctatgattgatgatgatgagattgttagttctcggtggttagatgcacttattgaatgccagatacagacaaattctgatgtgatacaaggtaacacttatcctatttttttggataaaaaaagaaaatggatggaaaaagtttcattttattaccgagacttattagtatcagattctaaagatataaatgttagcacttgtaatgtatttattgtacgccgagtgtatgaatcgatgaaggagcagctgtttgacttgaattttggtgttacaggaggagaggatacggattttttccatagagcaaagcaaattgggatcagctgtttctattgccgtgatgcactggcctatgaattctatgaccaaaatcgtgcaaatattttttgggtattaaaaagaagttttagagtaggaagaacaaattataggatatttaataataatgacctgagtaaggtatggattactgctctcattattccatttactattgtgaggcttgtttttttcttttggcatccaaacctgtacatacattatttaataaagatatttcgccaatttggagttgtagttgaaggtgttcattgtaatttgaataattga

SEQ ID NO: 10447 - DNA, 1014 bp, Photorhabdus luminescens; identical to SEQ ID NO: 7370

SEQ ID NO: 10448 - DNA, 510 bp, Photorhabdus luminescens
ttgaaaagttatttagattgcctgtataatctgatgaacaaaaatagtcatattgatatattaggtacttcatatatagatttctaccaaaatttccatacggttaactcatttcgcattaagaagttttatagaatcccttatattgcacatcaacttggtaagaagtatctgagttttcaacctactcagttaattagatttagtatatttcgtacccttggtggttttgatggtacaactagaattgctgctgatgatgattttttacttagggctattcattgtgtaaaggtcaggaatattaaccgtcccctctatgtaaagatagaaagagaaagctcccttaccacatcgtctattactggattccaatcagaaacgagattaaattatattaagaagctagatcaattacgaaatacaataaagagtaacttaccattatcagagtatatgaacaaacccaacgatgttcgatttcacctgaatgaaatcgagttaaaatag

SEQ ID NO: 10449 - DNA, 747 bp, Photorhabdus luminescens
atggacgacattaaagaatgcttaaaagaaattgtagaaaaaataaagagagaagaaaaagtcttagctattcttggatatggatcatattttacaggtaaatataaaaatggaagcagtgatattgacttgcttattatacatggaagtaaaattgatttatttagaaagaaggtagtctatcgtgaagtagaatttgaacttcggtatatggcagaaaaatctttagtaaaacttttatctcataagcatggaccaacaataaagcatatgttggattcagagattatttttgataataaaaatatagcaagagaattgaaactaaaaacctattctatagtcgagtcacctattgtagaaacattttctatagaaaatagaaggaaaagtgcattgctaattgaaagcctataccggaaggtacatcaagtgaaatatgaccttggatttttcgaatttgcatgttctaagtttttgctcaatattgcagattcttatatcagacttcatcgtcattgggggctgcaaggttttcgcaaaatgattagccagctcaaagatattgatgaaagttttgctgagcatttctcactggcaatgagtcctaatcatatagaaacaagaattaaggaaatagattttctttatagagaggttattatgcttcttggtggtgaaacaaattctgatgaaaattttgtgagtcagggcattatgaacatactgaatgtggttgataactaa

SEQ ID NO: 10450 - DNA, 1095 bp, Photorhabdus luminescens
atgaaaatggatgtggcattgaaggataactttgcgacaggttatataaaatctttattactatactctttactattaagtgtcattagttcttttgctgcattttttatgcagtatctgattgacgcggttataccatcaggtgacttgcgttttttatttatctttatgatatcctatctattatatgaatcattcaatatgatactaacttatttgactgctcgctttagagcatcactggaaaaatatttggactattattatttagataaatatttacttgctttgattactacaagattatctatattgaatgattataataaaggtggattgattcaaaggatttatgatgctcaaaatattaaaaagtattatttgactctgctaatagatattgttgttaagcttattacgattttaatattatcaatcatagtgctatatgttagtcctctagttgtcagctttttgatcttaggaatgattatgctggtgattgtctattttttgtctgtcaagaaaatgattattttagaagagcagcgttttaaaataaaatcaaattttctttcaattatggatgatattattggaggaagggaaacgatacgaggcaataactatcgaaacaggattctgaatagatgtgttgacaggatgaatgattttttgaatagggagaaaaatgttgcattacttgttgctggtgtgaaaagtaaaacgctaacagttaacacaatcattggtactgttattagatgtgtcatggttattagcattattagatatagtagtttttcactaggtataatgttgacattaattgcttttacagaaatgtctctaaaacatacaatgcaaattttagtttcttttatggagttgaaaagatcaagcattactcttgaaaggtataaagaattcatggggaataatgttgtagatgagagtttattgaatactgaattagatgataatattgttagtgtagacgaaattacagtgaggaatcttcatattggtactaatggaaatatcgtctgtaaaattccggattttacctttcaaagtaataagatatacccgtaa

SEQ ID NO: 10451 - DNA, 1026 bp, Photorhabdus luminescens; identical to SEQ ID NO: 6127

SEQ ID NO: 10452 - DNA, 528 bp, Photorhabdus luminescens
ttgattggtttgattccacctgtaaatggatctgtgaatttttatgtttctgataaaactattaagcctgaaattcatataaatcaatgctctgcatacttcccacaagatatactctttactacaagtattattgaaaatattacattaggaagagacgttgataggaataaagttgagagtatgcttaaaaaattaaatttatggcagacaatagatagcttgcctgaaaaactagataccgttattagtgataaggttaaccctttttctgaaggacaaagacaagtattactctttttacgaggttatctgtcagataaatcggtattgatatttgatgaaatatttagaggaattgataatgaaaatgctaaagtcgtaagtaaattaatttcagaaaaagaaggttgtattatattctatgtcgctcatgattttactatcgattgtgaaaatcatgaagtgttagagttgaaaagtgaaaaggactatgatttcttcaaactagaggcttttaatgaataa

SEQ ID NO: 10453 - DNA, 1176 bp, Photorhabdus luminescens
ctgcataaagaatataaattaattataagtataacagtttttttgctgattatatgttttgctttatcttttgttgtgactataaagaggcgagttgttttagaaaatgcttttattaaaaccgcaccagagcctgtattattttatgcagaaaaggatatagacattaaaaattataatgttcgtgatggtgatgtggttaaaaaaggagattctatttataatgcgattaatccagatttagaggaggctgaatctattttattgcaaaatataaaacgagataatacgaaaattaatgcgatggaaaagtatatagataatgtctatgagcggatgaagattgaaaaaaattatgaggattttaagtttaataaaaatgaaagtgagttaaaaaatatagactctattttgaaagaccatagagatgactatgatttttttagtcaaagctacagagaacagatgaattttgtagataaattgttaaatcagaataataattatttatctaagaaagatattattaaatataaaatggaattgttctcatcacgtcgtggcctgattaatcttgaatctgatatattagacttagagaaaagaaagtacagtttagatgatgagcagagtagatacataattggagcaaccaaatataaagagttagatatggagcttaaccagttaagaggtgaactctccgttcttgtctcagaattgaatgtaaaaaacacagggatggagaatataaagaatggtaagttgagaatagaaggaattgcaaaagctgatggtaaggttgagtttaataatattaatggcatcaggcctaagcaggtaaaaaaaggcgagttagtttttactatatatcctgatggtaatcactttatagcaaaaggagttgttagtgaaaaatacattagaaagattaaaattggacagagcgtagaattaaaaatggatgcttatgattatctcaagtatggggcaataaaagggaaggttgaggctatatttggcgtaaaaaacggtacggctgaaattgtgattaatattgttgataaaagggattttgatttagagtttggtaattcaatcaaggcgtttatcatcttggatgaagttaatttgtatgaatatatatatgaaatagtatttccatatgttgcttaa

SEQ ID NO: 10454 - DNA, 519 bp, Photorhabdus luminescens
atgtcactgaccaccattattaaagataccccaatatgggtttggattctttttgcttttctcatcaggcgcgggatcagtgccttgtacgatcgtgaaatgcgaattgatcgccttttcttactaccaatagtattcctggtctggggagtatatagcgtcatttatgaaaccacattctcagatttagccttgataacgatgacagcgggtttattcgtcgggattgtaataggatggggtctgtggcgttctcaaccaagattacgtgaaaaagcaggcagtgatttaatcatccgtcctggtacttggttaacgctgacgctgattgttatcacatttatcgttaagtttattattacggccatgttaagtattcaccctgcgttgttgcattcgttacacttcaatctgttttttggctttagcaatggtgtgcttgacggtattttctggggcggaacgttaaatctttttattccttggtgcagaaacaggaccaagagcatctacaaatag

SEQ ID NO: 10455 - DNA, 1338 bp, Photorhabdus luminescens
atgactgcaacaaacttttctgaacttgagcttgatgaacgcctgcttgacgccctgaatgataaaggttattcccgcccaacagcaattcaggctgcggctattccggcagcaatggacgggcgtgatgtactaggatcagcgcctaccggtaccggcaaaactgccgcttacctgctgcccgctatgcaacatttattggattttccacgcaagaaatctggaccaccacgtattttgatcctgacgcccacccgtgagctagccatgcaagtggcagatcaggcaaaagaattcgctgcacatacccatttggatatcgctaccattactggcggcgtagcctatatgaatcacgctgaaattttcagcgaaaatcaagatattgtcgtcgccactacaggccgtctgctgcaatatatcaaggaagaaaactttgattgtcgggcagttgaaacacttatccttgatgaagccgatcgtatgctggatatgggttttgccaacgatattgaaaccatcgcgggtgaaacccgttggcgcaaacagaccatgctgttctctgcgactctggaaggggaagccattcgtgattttgctgaacgtttactggaagatccagttgagattgatgcagaaccgtcacgtcgtgagcgcaaaaaaatccagcaattttactaccgtgccgataattcggcacacaaaacagccctgctttgccatttactaaaacaacccgatgtcactaaatccattatttttgttcgcaaacgtgaacgtgtacacgaacttgcggataaattgcatcaagctggcattaaagcccggtttcttgaaggggaaatggtacaggctaaaaggacggaagcagttaagctcctgaacgatggcagtgtcactgttctggttgcaacagatgtcgctgcccgtggattggatattgatgatatcagccatgttttcaatttcgatttaccacgcaccgccgatgtttatctacaccgtattggccggacagcgcgtgcaggtcgcaaaggtactgcaattaccttagtggaagcgcatgatcatcctttattaggcaaaatcagtcgctatctgaatgaaccactaacgtcgcgagtggttgatgaacttcgcccaaccactaaagcaccaagtgacaaagcccgcaataagccatcgaaaaaagtattggctaaacgtaaagagaaaaagaaagcggaagaatcgaagaaaaaagccaaaatacgtcatcgagatagtaaaaatatcggtaaacgccgtaaaccttctggtaatccaaaaccagaaacgccagtcagtagcgatgcgtaa

SEQ ID NO: 10456 - DNA, 735 bp, Photorhabdus luminescens
ttgaaacagaaacgacttttacgccgggatggatttactttcaagcaattttttgttggtcatgatcggtgtgcgatgaaagtcgggactgatggcgttttattgggagcatggactccagtgagtgacaaaaaagcgattttagatattggctgtggcagtgggcttattgcgttgatgctagcacagcgtacggatgaaaatactaaaattgatgcagtggaactggatacagaggccgcattgcaggcacaagataatgcagaacaatctccgtggcagagaaaaatagatgtttatcagcaggatattggtgatttcgctgaacagtattcgcaatgttatgacttaattgtcagtaatcccccctattttgaaccggctgttgcttgtcgaaatgaggcaagggaacaggctcgttatacggggtcgatgactcaccagcagttattacaatacgccgagacgttgattacagcggatggtctgttttgtgtggtattgccatatgccattggtgaggaatttgaaacaatggcatgtcatcagggttggttttcccatcatcgggttaatatccgcgataggcaaggcaagccattgcatcggatgttattggcattttcccgtaaggaaaaaactggcttaatcagtgaattgactattcgtcagccagacggtgcatatacgcaagaatttcagcaattggtgacggatttctatctctattattga

SEQ ID NO: 10457 - DNA, 1605 bp, Photorhabdus luminescens
atgcaatcattatcctctcaacattacagcgatgtacttattattggcagcggtgtcgccggtctatctctggctttacggctagcctcacaatataaaatcacggtattaagtaagagtattcttagcgaaggtgcatcctattatgcacaagggggtatcgccgctgtatttgataaaacggacagtatcgcatctcatgttgaagatacccttatcgccggagcagggctttgcgataaaagtgctgttgagtttatcaccagtaatgcccgtcattgcgtgcaatggttggttgatcacggtgttatgtttgatacagaaaccagcgaagatggagaaaaacaataccatctgacccgtgaaggtggtcacagccatcgtcgtattctgcatcatgctgatacaaccggcaaagaagtagaaacgacactggttgataaagcgatgtctcatccgaatatcacagtgagagagcgctgcaacgcagtggatttaattacgtcaaataaagcccggttagacggtgagaaccgagtcgtcggcgcttatatctggaaccgtcagcaagaacaggtggaaacttatcgcgctaaggttgtggtactggcaacaggcggtgcagctaaggtctatcaatatacgacaaatcccgatatctcatccggtgatggcattgcaatggcatggcgcgcaggctgccgtatcgccaatctggaatttaaccagtttcacccgacctgcctgttccatccacaggcgcgtactttcctgttgacagaagccctgcgaggtgaaggcgcatatctgaaacgaccagacggcagccgctttatgcccgattttgatgaacgcgctgaactagctcctcgcgatatcgtagcacgagcaattgaccatgaaatgaaacgccttggtgctgactccatgtttctggatatcagccataaaccagcggatttcattatccagcattttccaatgatttatgaaaaattgctgacactgggctttgatctaacaaaagagccgattccaatcgttcctgccgcgcattacacctgcggtggtattgttgtcgatcatcagggacatactgacctcaacaacttatatgctatcggtgaagtcagctatacgggtctgcacggtgcaaaccgtatggcatctaattctctgctggagtgtctggtgtatggctggtctgctgcggaggatatccaacaacagatcgaaacaatagaagaagtaccgcaactccctttctgggatgagagccgggttgacaattcagatgaacaagttgtcattcagcacaactggcacgaattacgtctatttatgtgggattacgtcggcattgtgcgtacaaccaaacgcttagagcgagcactgcgccgtattaatatgctgcaacaggaaattcacgattattactctaatttcaggatttctaacaatctgctggaattacgaaatctggtgcaaatcgctgaattaatcgtacgttgtgcgctagaaagaaaagagagccgaggtctgcacttcacactggattatcccgatttactaccagaatcaaaaccaacgattttgacaccctga

SEQ ID NO: 10458 - DNA, 570 bp, Photorhabdus luminescens
atgagcgagcagttaacggatcaaatgctggtcgagcaagtgcagaaaggtgaccaaaaggcgtttaacctactggtagttagatatcagcataaagtggcgagtcttttatcccgctatgttccgcagggtgatgtgcctgacgttgctcaggaaacatttattaaggcctatcgggcattggcttcgtttcgtggtgatagtgctttttatacttggttgtatcgtattgcagtaaatactgcgaagaattatctgaccgctcaagggcgccgtccgccatccagtgatttggatgccagtgacgcagaaaattatgaaatttcgagtgcattaaaagaaatttcgaaccctgagaatttaatgttgtcagaagaattgaggcaggtggttttccgtaccattgaatctcttcccgaagatttgcgaatagcaataatgctgagggaattagatgggttaagctatgaagaaatagctaccattatgaattgcccggtaggtacggtgcgttcccgcatcttccgtgcaagggaagccattgatgataacattcaaccactgatttaa

SEQ ID NO: 10459 - DNA, 651 bp, Photorhabdus luminescens
atgcaaagagaaaaactttccgcactgatggatggcgaaactcttgatagtgaagtcgttagtattttgtctaaagattctgttatgcagaaacactgggaaaattaccacttgatccgtgacacattgcgcggtgatgtgacggaagtattgcatagggatattgctagccgggttgcatttgcacttgaaaaagagcctgttcattctaaccttggggatattcctgaatctcagcctcaaccagaaacttggcaaaaaatgccattctggcaaaagcttcgcccttgggtgagtcaaatgactcaagtggcggttgctgcctgtgtttcgctggccgtattggtaggtgtacaacagtacaacagtcatagtgcagaggatcttgaatatcaatctgatacgccggcatttaacaccttgccaatgatgggttcggcttctccggtgagtttgggagtgccttccggtgatgatgtatttggcaatgatcaacgccttcaaatgcaggagcgtaataaacgtattaatattatgctgcaacaatatgaactcgatcgccgtgtgcattttaagcaaaatgatgaacggggaatttcaccacaggttgttattccggttcccggaacgcaatctttaggaacacaatag

SEQ ID NO: 10460 - DNA, 957 bp, Photorhabdus luminescens
atgaaacgtatttggttctccgtctgtttgctggcgggcagcctgtttgctcctttacaagcctcggcgcagctcagcagtgctgaggttttgttgcaggagatgggtaatgccactcgctctctaacttacgagcttgcttttattaatctcaacccacaggctattgtctcggttcgttatcgccacgctattatcaatggtattccaattgctcagattatgcagatggatggctctcgtagggaagttgtccagcgcggtaatgagatcagttattttgaacctggattggatgctttcagtcttagcggtaatcatattattgattatttaccggccgtcatttttgctgacttcaatcagttgaaaaaatattacaatttcattgatgttggtcgtacccatatcggtgataggccctgtagggttgtacgcatcacctccaaagatgaagtgcgttataattatattttactgatcgacgaagagactcatttaccattacgtattgacttacttgatcgtgatagtgaggcacttgaacaatttagggttgtttcttctaccattgatggggatatcaatgatgcaatgagtgtgattactcgcttaaatatgccgccaatgctggtcattccaccatcagagaaggttgtatttaattggaaggtgggtaaattgccgattggtttcgttgaggtttcgcgtagccgtcgtaaattgccaaatagcggcacacttgaatctgttatgttcagtgatggtttatttagcttttccgtgaatgtgactaatgctgataaaaccggtaagttggaatatcctctccgtcgtggggcccgaacgatttatagtgcaatacgtggtgcaaatgaggtaacaattattggtgaattaccattggcaactgccaagcgtattgccgctggtgtcgcatttataggagctgactga

SEQ ID NO: 10461 - DNA, 465 bp, Photorhabdus luminescens
atggttaaagagtgggcaacagtaattcactggcaacaggggcgggcattattacgttatggttcctcttctggttgtggcagttgtcaggcgcgagcaacgtgtggttcttatttactcaataaattagggtctgatggcatacatcagcttgaacttgagattttacaaccgctgcaaccggggcaaaaagtggaagtggggatccctgaagggagtttgctgcgttcggcgttgctggtttatctgactccgcttattgggctattccttggtggtgcacttttgcagttatggataaccaatcaattgtgggtgttttgtggcggtgttttaggaggcgcgttggggttcttctttgcccgcggagtcgccacttactgggataatcggcaggaatatcaacctgtcgttttgcaaatcggcttgcctcctgatgccattcacattcagcagcgggaataa

SEQ ID NO: 10462 - DNA, 1797 bp, Photorhabdus luminescens
atgaagcaaatacgaaatttctccattattgctcacattgaccacggtaagtcgacgttatctgaccgtattattcaaatttgcggtggcttaacagatcgtgagatggcagagcaagtgctggattctatggatcttgagcgtgagcgtggtatcaccattaaggctcaaagtgttaccttggattacaaggcgaatgatgggcaactctatcaattaaactttatcgatacgccggggcatgttgatttctcatatgaagtttcccgctcactagcggcctgcgaaggggcattgctggtggttgatgcgggacagggagtggaagcccagacgctggctaactgttataccgcgttagatatgaatctagaagttgttcctgtgctgaataaaatcgatttgccagcggcagagcctgagcgcgtagcggaagagatcgaagatattgtcggtattgatgctactgatgccgtgcgctgttcagctaaaacgggggttggtgtacaagacgtcattgagcgcttggttaaagagattccagcaccggaaggcaattctgatgagccattacaggctcttatcattgactcatggtttgataattaccttggtgttgtctccttggtgcggattaaaaacggcaccttgcgtaagggtgataaaatcaaggtgatgagtactggtcaggtatataacgctgatcgtcttggcattttcactcctaagcgtgttgatcgtgatgtattgggttgtggcgaagtgggctggttagtttgtgcaattaaagacattcttggtgcgcctgtcggggatactttgacattggcccgtcaacctgcggaaaaaccacttccgggctttaaaaaagtgaagccacaggtttatgcagggctgttccctgtcagttctgatgactatgaagcattccgtgacgcattaggtaaattgagtctgaatgacgcttcgctattttatgagccggaaagttcttctgcattgggttttggtttccgttgcggtttccttggtctgttgcatatggagattattcaagaacgtctggaacgtgaatatgatctcgaccttattacaacggccccaacggttgtgtatgaagtggagacaactagccacgatactctttatgtggatagcccatctaaactaccgccgctgaataatattgaagagctgcgtgaacccattgctgagtgccatatgctgttacctcaggagtatttggggaacgtcattaccttatgtgttgaaaagcgcggggtgcaaaccaacatggtttaccacggtaaacaggttgcactgacttacgaaataccgatggcggaagtggttttggacttcttcgatcgattgaaatctacctctcgcggttatgcttcgctggattataatttcactcgtttccagtcatctgatatggttcgtgtggatgtattgattaatgctgaacgagttgatgcattggcattgattactcaccgtggcaatgcacagtaccgtggtcgggaactggtggagaagatgaaagaacttattcctcgtcagcagttcgatatcgcaattcaggctgcgattggtaatcatattattgcgcgctcaacagtgaagcaattacgtaaaaacgtcttggcgaagtgttatggtggtgacgtcagccgtaagaaaaagctattgcagaaacagaaagagggtaagaaacgtatgaaacaagtgggtaacgttgagttaccacaggaagctttcttagccattcttcatgttggtaaagacaattaa

SEQ ID NO: 10463 - DNA, 981 bp, Photorhabdus luminescens
atggctaacacttttgccctgatcctaacgttggcaacgttagtcaccggcattatttggtgtattgatcgtttcaaatgggcaccagagcgcaagaaaaaacttgccagattgcaggagctgactgagggtacaatggatcaggagcatctggctgagactattaacaagccaacatgggtggatacctgttcatctatttttcctgtgttagccgtggttctgatcctgcgctcttttgtttatgagccttttcagatcccatcgggttctatgatgccaactttattgattggtgatttcattctggtagagaaatattcatacggattgaaagatcccatcactcaaacaacattgattaagactggcgaaccaaagcgtggtgatgttgctgtatttaaatacccgttggatccaagttttgactacatcaaacgtgtggttggtttaccgggtgataaaattatttatgatccggcaaagaaagaattgcgtattttttctaattgcagtgagacagggaattgtcagggagaattaccggtttcttacggttcactatttccaagtgagtggacaatgcagcaatatggtgttgactccaaaggtgaaagtttgagaaaggtaggtgttttccaaatccccgttgaagaaacattgccgccttacagtatgcggcagggtgaacgaattgagaatttggacgcagtgaaccatcatattttggagattcccggtgtactatcggtacctaatttccgtcagcctggcttgccagagggaatgtggattgtgcccgaaggtcactattttatgatgggtgataaccgtgataatagcgctgatagccgtgcatggggctttgttcctgagaaaaatctggtcggtcgcgcttcagctatttggatgagttttgaaaaacaggaaggggaatggcctaccggagttcgcttcagccgtattggtggaattaattaa

SEQ ID NO: 10464 - DNA, 681 bp, Photorhabdus luminescens
atgaatcccatcgtaattaacagattgcagcgtaagctggggtacacttttgatcagtatgatttgctgatacaagcgttaactcatcgtagtgccagcagtaaacataatgagcggctggaatttcttggtgactcaatcctgagttttgttattgccaatgcgttgtatcatcgttttcctcgtgtagatgagggggatatgagccgcatgcgtgccacattggtgcgtggtaataccttggctgaattggcaagggaatttgaactaggtgaatgccttcgtttggggccgggagaattgaaaagcgggggttaccgtcgtgaatcgatactggctgataccgttgaagcgctgattggtgctatcttccttgatagcgatattcagtctattgaaagaattattctgagctggtacgaaacccgcctgaatgaaatcagccctggcgacaaacagaaagatccgaaaacccgtttacaggaatatttgcaagggcatcatctgcctctgccatcatatctggttgttatggttcgtggtgaagctcacgatcaagaatttactattcactgtcaagtgagcggtattgaacagccggttaaaggaacaggctccagccgtcgcaaagcggaacaggcagcggctgagcaagcattaaaacaactggagcttgaatga

SEQ ID NO: 10465 - DNA, 909 bp, Photorhabdus luminescens
atgagcgaacaagaaacctattgcggatttgttgcaatagttggacggcctaatgtggggaaatctacgctgctaaatcagcttttaggtcaaaaagtatctattacttcccgtaaaccgcagacgactcgtcaccgtattatgggtatccatacagaaggtgcgtatcagattatttatgtggatacgccagggttacatattgaagaaaaacgggcgattaaccggctgatgaaccgggccgccagcagttctatcggtgatgtggagttggttatttttgttgtcgaagggactcattggaccccggatgacgagatggtactgaacaaactgcgtaatctacgttgtccggttttgctggctatcaataaagtggataacgtgaccgataaaaccagcttgttgccacatattggttttctcagtaaacagatgagttttcttgatgttgttccaatgagcgctgaaaaaggcatgaatgttgatacgattgccaaaattgtgcgcggatatataccgaaagcggctcaccatttcccggaagattacattactgaccgttctcagcggtttatggcttctgaaatcattcgagaaaagcttatgcgttttcttggtgatgaattgccatattctgtcacggttgaaattgagcagttcgtggcgaatgagcgcggtggttacaacatccacggtttgattctggttgagcgtgaaggccagaagaaaatggttattggtaataaaggcagtaaaatcaagaccattggtattgaagctcgtcaggatatggaaaggctgtttgatgcaaaaatccacttagaactgtgggttaaagttaaagcgggttgggctgatgatgagcgagcgttacgtagcttgggttacgtcgatgatttgaaataa

SEQ ID NO: 10466 - DNA, 726 bp, Photorhabdus luminescens
gtggacggttggcaacgtgtttttgttcttcatgggcgtccttacagtgaaactagtctgttactggatctgtttactgaaaatgaagggcggattagcgtgttggcaaaaggtgcgcgtggccgtcgttccaatttgaaaggctgcttgcagccctttaccccattgctggttcgttggagcgggcggggggcaattaaaacgctgcgtgatgcagatcctatctctctggcccttcctcttaccggcagtgtgttgtatagcggtttatatatcaatgaattgttgtcaagagtgcttgaacagggaacggcttatcccgccttattctttgattatctccaatgcttgcagattcttgctgccagtgaatatacaccggaatatgcattacgtcggtttgaactggcgttgctggcaaatcttggttatggcgttgattatctgcattgtgcgggcagtggtgaacctgtcgctgacacgatgacctaccgttatagagaagaaaaaggatttattgctagcttggttgttgatcattacagttttaccgggcgcgaattaaaatcactggcaactcgtgaattccctgattctgcaacattaaaggcagcaaagcgtttcacgcgtattgcattaaaaccttatctaggtggcaagcctttaaaaagtcgtgaattatttcggcagtttgtacgtcagcagcctgaaaagaaagaaaactaa

SEQ ID NO: 10467 - DNA, 732 bp, Photorhabdus luminescens
atggctgaagtattattaggcgttaatattgatcacattgcgacggtgcgcaatgcccgtggtacccattatcctgatccggttcaagcggcttttgttgcggaacaggcgggagcggatggtattactattcatttacgagaagatcgccgtcatattaccgatcgggatgtcgaactgttgaaaaaaactattcagactcggatgaaccttgaaatggccgtgactgatgaaatggtggatattgcctgtcgtattaaacctgaattttgctgtttggtgcctgaaaaacggcaggaagtgacaacagaagggggcttagatgttattggtcagaaagataaggttgctgcggcggttaagcgtctatctgatgcgggtattcttgtctcgttatttattgatgcggaacatcgacaaattgatgcggctaatgaagttggcgcacctttcattgaaattcatacgggtgcttatgccgatgcaaaaaatgaagtagaacaggaaaaagagtttcatcgtattaaagcagccgcgacttatgcagcgagtaaaggcttaacggttaatgcgggtcatgggctgacatatcataatgtacaacgtattgctgctctgccagaaatttatgaattgaatattggtcatgccattattgggcgtgcggtatttagtggtttaactgctgctgtggcagatatgaaaacccaaatgcggaaagctcgccgttaa

SEQ ID NO: 10468 - DNA, 381 bp, Photorhabdus luminescens
atggctattattgggttaggtacggatattgttgaaattgcccgtattgaaggggttgtcgagcgctcaggtgagcgcttggcaaaacgcattctcagtgaattagaatgggaacaatatcagcaacatgaaaaaccggttcgttttttggctaaacgctttgcggtaaaagaggccgcagcaaaggcattaggaacgggcatccgcaatgggctggcatttaaccagtttgaagtggtcaatgatgcactgggaaaaccgattttgcggctctatggtgctgccgcagcgttggctcagcaattgggggcgacctctttgcatgtgacattagctgatgagcgccgctatgcctgtgcgaccgttattcttgagcgctga

SEQ ID NO: 10469 - DNA, 261 bp, Photorhabdus luminescens
atgtcgttattaatcaaaaaaagctgtatcaattgtgatatgtgtgaacccgaatgtcccaatcaggcgatatcgatgggagatgaaatttatgagattgatgccgaccgttgcaccgaatgcatcggtcattatgattcgccaacctgtcaatcagtctgcccgataaacaatacgattattatcgatccagaccgtcaagaaacagaagaacaattgtgggataaatttgtattactgcatcatgcagataaaatctga

SEQ ID NO: 10470 - DNA, 102 bp, Photorhabdus luminescens
atgctattactcaaagaatggaaaaaataccgaatgatgcttaaccgagttgacacttcaaacgcaccagaaattgactggccaactccgccattatcgtaa

SEQ ID NO: 10471 - DNA, 720 bp, Photorhabdus luminescens
atgaatccaaagaatgattttaaagcgttttctattagagatggtgctaatgtggtagctcaaaatttatatgaaaatagtccagaattgcagactggattttcaccagacggtcttaccctccatatattaaataaggcattacgtcagtcttccacaatatcatctgttgtagccgattttattgcgacagaatctgacagtgatgttttggatgatggtaatataaccaaactcaccacccaattaaatagagcgttagagcgaaaaattataactaaaatttccgactccgcattagaaaaagcaaaaaacggagcagacattcccaataaaaatgcgtttttaaaaaatttaggtttaaatgaagcggcaaaacgggaagtaggaattggggttaatcagattccagatatgtcctttttcaccaaaaatttagctgaaaccggctggcaaaaattaccctcagggttaattgaaatgtggggaacagcgttagttaaaggtaatgctctttcctcacctggtaatttgaataaatttccaattccgttccctaataaatgtctcaatgtcacgttaactcaccttggtactgcccctcaatacgcagggatattctcagtaatgatagtcgataatactcagttccaatgttttagcagtattacagacttacaaaaccctgtagcagcatattatagagctgtaggatattaa

SEQ ID NO: 10472 - DNA, 435 bp, Photorhabdus luminescens
atgaacgataaaaactatgtattcagtgcattaaataaagcattttatccgctattattacaacaggagtatattgaagctggctcatggccaaatgaccctatatctgtaactgatgacatatttaatacgttctctggaatcccgcccacaggaaaaatactttcctctgacgaagagggtcttccttgttgggaagatattccaccaccaacaaaagagggattgatatccatagcagaagttcaaagagcgcaatttatatctctggcaaatgaaaaaataaccccactggctgatgcagtagaacttgatatcgcaacagatgaagaaatactatcccttaaagaatggaaaaaataccgggtgatgcttaaccgggttgatacttcaacagcaccggaaattgactggccaatttcgccattatcgtaa

SEQ ID NO: 10473 - DNA, 828 bp, Photorhabdus luminescens
atgagtcaaaagaatgattttaaggctttttctattagtgaaaatgcaaatataatgccccaagaaacatatgaaaaagaacaaaaattacaaactgggtttccaacagcagatattacccctgaactattgaataaggcattacgtcagtcgtcaaccatatccactgtcgtcgctaattttatcgcaacacaatctggcgaagatgttctggataatggggatatagacaaactcaccacccaattcaagaaatccttagaacaaaaaaacacaacagaaactcgcgatgcctcattaacagaaaaaggaattattcagctcacagaccaaataggcaacagtaatacactcgctccaactcaaaagcttgtttctgatgtaaatgataatgctaataatcgactggcaaaagaccaaaacggcgcagacattcctgataaagctgcatttataaagaaccttggtttatccgattcaacaaatataacgatagggaatggtgaaaatcaagtgcctaatatgtcgtttttcacctctagcctgaatcaggtcggatggcaaaaattaccttcgggcttaattgaaatgtggggaatagcatcagttaaaggcaatgcttatgccgaacctggtgctttaaataactttccaatcccattcccgaataaatgtctcaacgtcacgttaactcacgttggtaacgcccctcaacatgcaggcacattttcaataatgatggtcaataatacccaattccaatgttttagcagtattccaaatttacaagttcctgtagccgcattttatagagcaatagggtattaa

SEQ ID NO: 10474 - DNA, 828 bp, Photorhabdus luminescens
atgaatcataagaatgattttaaagcgttttctattagcaataatgcgaatgtagtcagtcaagaaagatacgaagaaagtcagagtttgtattctgggtttccaccagataatgttcccactcacttattaaataaggcattgcgtcaatcgtccacaatagcctctgttgtagctgattttattgcgacagaatctagcagtgatgttttggatgacggtaatacaaccaaacttactacacaattaaataaagcactagaccaaaaacttacaaagaaaattcccgatgcctcattaacacagaaaggtattgttcagcttacaaatgtagttggcaatagcaatacactggccgcaactcagaagctggtctccgatataaatgataacgccaataacagactagaaaaaacgcaaaacggctcagatatccccaataaaaatgcgtttgtgaaaaacttagggttaaatgaagcggcaaaacgggcagtggggactggagttaatcaaatcccagatatgtcattcttcacctcaaacttggttcagaatggttggcaaaaattaccctcaggtttaattgaaatgtggggaattgcacgagtttctaccggaggaagacctgatctcggatatcttaataactttccaataccattcccaaataaatgttttagcatcacattaactcacaatgattgggacccgagagcagcaggaatattcggggcatccgtagtaaatcagagtcaattcaaatgttatagaggttcaggtgacggccaaccttttgtttatacctattttagggcaataggatattaa

SEQ ID NO: 10475 - DNA, 1272 bp, Photorhabdus luminescens
atgagtcctaaaaatgattttaaggctttttctattagtattaatgctaatgcagcgagccaagaaaaatatgaagaaagtcagaatttgaaaactgggtttgcacccgatggtattaccactaatatattaaataaggcattacgtcaatcatctacaatatcctcagtagtcgctaattttatcgcgacacactctggcaatgatgttctggatgatggaaatatagataaacttaccgctcaattaaatcaggcattggaacagaaaatggcaccaaaggttcccgatgcctcattaacacagaaaggtattgttcagcttaccgatgtagttggtaatagtcattcactcgctgcaactcagaagcttgtttctgatgtcaatgataatgctaacaatagattagccaaaaaccaaaatggggcagatattcccaataaaaatgagtttgtgaaaaatctcgacttattggaaaccgtcaatctggcgaaaaatgctgtgccgaatagtaggaaaattaatggtaaatcgctgactggagatatcaatttagcggctggcgatgtgggagcatttaggctcggattaacaggaaaatattctgttgataaccaagtcccgtggaatgtagattcagggtcatatgacttactgcatgcgaaatttagtgatcatgttgtgcacttctataatggcgctgggaattgtccggcttttcagttgaaagtgcattataaaaacgggggtattgcttatcgctcggctcgtgataattatggatttgaagaagattggactagcatttatacaaccaaaaacaaacctactgtaaatgaacttggcttatcagaaaccgtgacattggcaaaaaatgcggttcctaataacaggaaaattaacggcaaagcactgattgaagacatcaatctggaagccagagatgtgggggcatattcacgttcagaatccgacgaacgatatcaaaagaaaggccctaatcagggatggcgaaaaataggaaggagtggagatagtggaagtagcatattactgagtcaggacatacgaggaagatgtatatatttacgtactggtagcccaggtatatttttacctttacaaatgcctccgatcgataatattttggttggcactggatatggatcaaaaggatggctcgttgtgcattcatcagacggaggagtgaggctatctatagtaaacaaagaggattgccctgatattacagaaatttatattgctgattaa

SEQ ID NO: 10476 - DNA, 720 bp, Photorhabdus luminescens
atgagtcccaagaatgattttaaagcgttttctattaataataatgccaacatagtgagtcaacaagaatacgaaaacagacaggatttaaaaaccgggttcccaccagaacatattactattcatgtattaaataaagcattgcgtcaatcatcaacaatagcctctgccgtcgctgactttattgcaacacaatctggcgatgatgttctggatgatggggatattgttaaactaatcgcccagctaaatagagcattagaacaaaaaattataactaaaatttccaactctgcattggaaaaagcaaaaaacggcgcagatattcctgataaaaatacgtttataaaaaacttaggtttaaatgaagctgcaaaacgggaaataggagctggcgttaatcaggttccagatatgtcgtttttcaacgcaaacctaggttctaccggctggcaaaaactaccttcgggtttaattgaaatgtgggggtttgtgctagttcaaggctatggttctatggaggccggatatttaaataatttcccaatcccctttccgaacgcatgtttaaatgttgtgttagctaacggtggttataaccctcaagactccggaatatgttcagtacatgtagtagatcggagtcagttccgatgttatagaagccctactaatcatcctacgcctgttggcgcgtattttagggcgataggatactaa

SEQ ID NO: 10477 - DNA, 600 bp, Photorhabdus luminescens
atgatgaataaggctgtactggataaaaataatattgccatcagtgccggaagtatcgttgtgtttaattacgatgcgattacgctggaatatttaaacagttctgatgagtaccttcccgttggtatcggccttcctgccaattcctgcatagacgcaccacctaaagcccaagagggatatatcgcctgtcgttcacctgatttaaccggctggcaaatggtaccagactatcgagggagaatagcttacaacacccaaactggggaacagaaggaaatcattaaaccgggtgaattaccagaaacactgacattcaaacaaccaagcaccgattttgataagtgggatggtgaaaaatgggtaacggatattgaagctcaaaaagccaaccagattaaacaggcagaacaacaacgtgtcattcttcgtcaacaggctaatgaagctatcactttattacaatatgccattgaaactgagatggcctcagacgcagagaaagcattattgcttgcctggaagaagtatgtggtattactgaaccgtgttgatacttcaatggtttcagatattaagtggccacaaataccagaataa

SEQ ID NO: 10478 - DNA, 501 bp, Photorhabdus luminescens
atgagcacgttggtacttgaagaaatcccggtaggaataccacttccttggccgactgacataccaccaaatgggtgggtgaaatgcaatggagcgatcttcgatcaaactttatatccacaattagcgcaagcttaccctactggcagattacccgatttacggggtgaatttatccggggctgggatgatgggcgtggggtggatattggccgatatctattatccgggcaactagcagatattgctccacatagtcacagggttgtccggatgtggtccaactcaaatggcggaaccgacggggtaggttcagcgggccgtattctcaatagtgtctaccaaaacattaactacggcattgatcctcgcggaataggcatcgctatcggcatgggatctggtggttacggctatatggataatgcgattgctgcttcaacgggaacagaaacacgtccacgaaatgtggcatttaattacattgtgaggattgcatga

SEQ ID NO: 10479 - DNA, 402 bp, Photorhabdus luminescens
atgagtcccaaaaattattttaaggatttatctactagcaataatgctaatgtagtaaatcaagaaaaatacgaaaaaatcctgagtttgtattctggatttctaccagataatgtccccacgcatttattaaataaggtattacgtcgatcgtcaacaacagtctctgttgtagataattttatcatgacacaatctggtgatagtgttctcaatgatagtgatatcgttaaactcaacattcaattaaatagagagttagaacaaaaaatcataactaaaatttccaattacgcattgaaaaaatcacaaaatgttgcagatattcctaataaaaatgtacttgtgaaaaaccgaagcttattggaaaagctaattccggtaggtgcaccacctctttag

SEQ ID NO: 10480 - DNA, 10596 bp, Photorhabdus luminescens
atggggaaatcatcaaaccgtagtgcggaatttttctttactgggaaatatgatgatgatgatggtgggaataatattgttgctattggattgggaggggagatttatgccaaaggagggaatgatcatattaccgttggttcgctaggagcaacaatctatgccagttctggtgataagaccgtagatggtggtgccggatatttaaaaatagtgaatattggcggtgatctgaaggtacatggtgccgcgggttacgcaagtattgataaaaacggtaatggcaatatttcatttattggtgcggcgggtggtgtttctatggatcaccgagggagcagcggtaatctaaatttttctggggctgctgcttataataacctcagtcgtagaggtcaatccggtaatgtgacatttaaaggtattggtggttataacggattatggcacgaaactcatcagggggatttaaactttaatgccgcaggggcgggtaataaaattgaccgtacttggcatgaccgttatgaaggaagcaagggaaatgtgatatttgttggtggaggggcagcaaatagcatcagttcacgggtggaaagcggtaatattgagttcactggtgctggggttgataaccacattattcgtaaagggaaagaaggcaatattatctttcagggtgctggagcattaaatcgcattgaacgtttgcgagatagtaaagataaatatgaacagactcgcggtaatattgaatttgaaggtgccgggggttataacaaagtttattctgatatagctcatggtaatatccgtttctccggttccggtggttacaatgaaatatcaagaataggtgaggatagcgattcgtataataaagctttgggatacgctagcgcggagaaaattgtattaataacggcgaagatgggatcccagaagcctcagcaagtgactgctattaaatcaacgactgagtctaatacttatctctttgcatttgctgacggaaaatatactaagatcagcaaagttcagctaaaaaatgatcctaaaaccaataaattgagttattactccacttcatggcgtaaaaatggtaatcaactcaaaaatcttgctacggaaaatatctctttagagaatggatatgatgatataagcaatgatggtgattatcgtctttccaatttaatctttgaacatcatcaacccgttactattcagcatactgttgaagaagatttgcgagaaaatcagtgggtgacttatgccagcggaaccacggctaaagcagaagatatcaagctgattgatgcaaaaatgcatgggcgttcaatccattctaatggttcggtattggatgtttcggcggtgaaatcgaatcgtcgatcaaatgcttatgtctatgccaaatatgtcgagtcatataccaaagtggttgtggtggaattgaagaatgatgataaaaccggcgagctgaaatattatgccagtgcctggtataaagcgggcgaccatacccgagatttagccaatgaagatttttcacgtgcaaatggttatagctcgatggaggtagggggatattcactcactaaccttaaatatcaagtcgatactgtacgtcgtgtctctgagcatttagaacatattgaagaagatagtcttcaggaatgggtgaaatcatcttcgaatatcggtgatagctccggtgacgttaattttagcggtatgggtggcggaaaccttattaaatccagtgtaataaatggcaatgttaattttgaaggtgatgggattgctaacgtcattcttcatagttcgagatctggtaatacgcattttgaaggcgcaggtgctgccaatatcatcgaaaaaagtggcatagatggcaatctgacattccgtggtgcaggtttggcgaatgtccttgttcaccaaagccggaatggggaaatggatgtttacgctggtggtgcggcaaacgttctggtgcgtgtcggtgatggacggtatctggctcgtcttttggcgattggcaatatttcaatccaccaaggtaatggcgatagccgggtcgtcatgttggggggatataacacccatacccaaataggtaagggcagcgcgaattggttaggtgccggcggttttaatgtcatgacccaaaaaggtaaagggagtatttcttcgttacttttggggggtgctaatgtgttgaccaagcttggcggagataatctggtttccggcatgctcgggggagccaacattatcacgcatatttcgggtgataatgaaatatcagataccacagcaattgcgctgggcggtgccaatatcctgaccaaaaagggaagaggtgatgctgttgcgctgatgggcggtggtgcaaatgttctgactcacattggttatggaagcacgacgggggtgatgttgggtggtgccaatatcctgaccaaagtaggcaacggtgatactaccggcattatgcttgggattggtaatgtgctgactcatgtaggagatgatcagacattaggggtcatgggagcagcaggtaacatctttactaaagtgggagatggaactgcaattgcggccatgattggtgctggcaatatctttacccatgttggcaagggtgatgcatgggcgttgatggggggtctgggcaatatctttaccaaagtaggggatggtaaggcgctggcattgatgatagccgctggcaatgtgtttactcacgttgggaatgggatgagcgttgctttgatgttggctaaaggcaatatcgctaccaaagtgggtgatgggacgaccttggcagcaatgatcggtgaggccaatgtaatgacccatgtcggtaatggctcaacctttgccgcgatgatcgggcagggcaatatcctgacaaaagcgggcaatgatttggcgcttggtttgatggtgggtgaagctaatatctattcgcatgtaggtgatggcaccagcattggcttgcttgccggtaagttgaacgtgatgaccaaaatgggtgacgggacaacgctggcggcaatgtttggtgaagctaatatcatgacccattatggcgacggtttaactggcgtactggcactgggtaaagccaatattgtcaccaaagtgggtaagggttttatgggggttgtggcagcggccgaggctaacgttgtgactcatatgggagcatcaacgacggctgccgtgctattaggtaaaggcaatattctgacgaaagagggtagtgggacgacggtcggcctgcttatttccgatgtgggcaacatcatgacccacattggtgatggcacaaccgtgggtttcgctaaaggtaaagccaatatcatcactaaagtgggggaaggtacagggattaacgccgtctggggtgaggctaatatcctgacgcatgttggtaatggtgatcgttacaatttcgcgaaaggtaaagcgaatatcattaccaaagtgggcggaatgcgagaagtcacggtagttcagggcgatgctaacattatcacccatgttggtaacggtgatgattataccggcgcttggggcaaagctaatgtgattactaaggtaggcgatgggaataatgtagtacttgctaaagctgatgccaacattgtgactcaggtcgggaacggtgacagctttaatgccttgtggagtaaaggcaatatcgtcaccaaagtcggtgatggtatgcaggttaccgcggcaaagggtaaagctaatatcaccactacggtagggaatggtttaagcgtcactgcgacacatggcgacttgaatgtgaataccaaagtaggtgacggagtttcggtcaacgcggtgtggggtgaatataacgtcaataccaaagtgggaaatggtctcaatgttgcgatcatgaaaggcaaaggtaatgccaatattcatattggcgatggcctggggatcaatgcctcttatgcccgcaataatgtggcgattaaggtgggtaatggtgatttctacagtctttctattgcagagagcaacacacaaagtagtcatctctcttctctgtttgagaatattaaacaaactgtgttcaatgtagagggaagccagacgattaattatctgattcgtggtgatgaggcaaatacttctggcgtcaataaaggtagaggggcgattaatttaaccgaagtttccgccattgatggtttccagatggataaaattgatgaagtgagttcggatctggcgaacaacttgagtggcgcaataaccccggtagaaacgcctgatattaacgttattcagaatgacttgcagattggagataatgttggttcagctcaggatcaggcatcaccacacgctgatgcggttgtcagacatgcgaagcagaataaagccgcgcaaaatgcgttaagcgataaagaaaaagcggagataaatcatcagcgtctgcaacaagagaaagataaacagcttaaaacgatttcaaaatcacaaggccaactagaatcaaccaatcaggctgcgctgaataccaatggtcaagtgcaacgtgatgtaataagtgaagagtctaggggagtcacggaagaactattctccctgactcaaggtatgggtgcgcttaataactatggaaattatgatggtaaatcaggtgatgagtggcgtaatcggtttgctggtggatatctggataatatccagaataaattaaatgatgccaaacttactgcacagaaaaaattagctgatgcacagcagcactttattgataaacgagaaacagtaataacagccattaagaaatcagaagtaggtttcacgaaaagcgctgagaatctagatagtgcagacgacgatattgtagacgctgagaaaaaagcggagcagagaaaagaagaggcattattacagaaacaacgagccgataaagcggtgagtgacgccaataccgcgtatgacaaagcgaaacagcgtggtgaaagtgatagtacagcggcggaaaataaaacgatacaggcgcagaagaatgcaaaaagcgtgaaacaggctgataatgctaaaccggatcgcactggggcagcgggcagcggtttgtctggaaacgcttatataccgattgaggtggagaaatcgaagagtcatatcgatcctgcatcaaaagctgaacctgacggttggctcagtgaagatctggcactaacagcagaagatttggctgctttgaataatgcgcaacaagcagtcaatcggttacagcttaataaagggatgcgttcagaaaataccggtgcttcgatcatgtcaatgtttaccgaaacatcatccgatggcgcggtgaaatcaactttaaataaatccagagaattaatcagaaaagcgccgacgatttcaggtattgatctgcaaggattagggggaaataaccctagatctcattcttctgtacttaaaaaactagaacttatcttactgaagaaggataacaagcggtttattgattcgactaaaaggcgtcttggttcgataaataccgatttgcctagtaaggcgctggtggccgtgcgtgaggcttttaaccgtaccgttgagcagcccgatgaacagcatgtattgcagcttgaacaaacattggcgcattggcagcagcatgatcccaaggaattcactcaacgtagcaaactggtgaaaagcttacgttttgagatgggtgagctggttgctcacattcaggcccagagagctgagtcagccgggattttggggatcgctgtggcacctgagcaggttacgcagtttggacagcaggtatcgttcgatgggattggccgtgtggtgggcctgaaaggcgatattgcacaaagcgaaattaatcgtctcactgatttgcaaattaagccattaacccagactaactctgtagcagagcgggaagcacctaagaccgaaaacgaaagccttatcgttttcgtcagccgattacaacaagaagctatcccagaaggtaagccgctgattgaacgtgccagaaaactttggcttaccgggcaagtgacaaatgaaaaaaccaaagaattatttaaggatgctgttgcccagttgcaaacatatcctgaattgcacacgctggctcaacagctattgactgatgctaataaagagaaggccactggacaatatattgataacctgtttggccgccattttgattctgaactggcttatgaactggtgaaaacggcttcaccagaggcgaaaaataccgctgaacgaacaggtaacttcttggtagaagattttgagcggtggataggtgatctttatcctgaaggtgagaaacgtaacggggcaattgataaaaagatgaaatcttttgccgaggctattgataaggattttcgcccttggttcagccgggtacctgaggtgacaacattcttggacgatccgacttttgctaatttcaagaccatgatgaccaaggttgatgatggtttttctgtgattaaggtgccgtttctggcggtaaaaatggcgactacatcgggaatggggatggatgttgctgactggaagagaaaaggggattctttctatctgaacgtgatcaccaaagctcgttcaaccagtactgaactgactgccgggacgaatgcggaggatgttaagtacaaagtaaaaattacggaaaagcagaccaatgattatggcacggcgttgccctaccaacctgcgaataataaacatgacgactttttgtatggtagaaaggtcgcggcaggccggatcttgactcccggacgggaaacggcatttgagagtaatgcattggagcgaggccagtctgtggtaactggcgcgtctggctcgaccaatatcatggttcacctcaatgactatattgccagcaagcaacccgacttctcaaccgggcagagctatctcaatacgctgtcgtttttggtatttgatggtggtcactctgtcaacgaaagtctggtggtttatcaggcactacaagcaactgatgagataaaacgtaaacagatactgaacagctacacggctaattatcaggatctggcggatattgctggggaatcgggtaaggtgtgggtaaatcaggcgctggataacgcgtttaaagaaactcaagagttttatcagaagtatgcggtagtaaaaccacaaagccgccctgcggtggaagacttagaggggttatctggcacaaataaaggggtagaaccgacgattatcggcgatagtcatctgaaaaagcccgttgatggctggcaaaaggtggacgtaacgccgcagactgatggtcgtgaaacccgttttgatggtcagattattcttcagatggaagatgacccgatagctgccagagcagccgctaatctggcgggtaaacacccggattccagcgtggttattcaactcgacgccaacggtaaatatcgtgttgtttatggcgatctggctaaattatcaaataaattacgttggcaggttgtcggtcatggtcgtgatacgtcagagcagaataacattcgtctgagtggttacagtgctgatgaattggcgacgaaattaaagcagttttaccaggcggctaagctgggcaaacaggccatcagcaaacccgatcacatcagtttggtgggttgttcactgattagtgataataaacgggatggctttgcgcgtcgctttattactgaattggataaacaaggcattcgcagtgatgtgtcagcccgtagtagcgaagttgcggttgacgcaacaggccgtaaatttacccgtgacgaaaataaccaatgggttaacaactcgcctgataacaaaattgtattgagcttgaatgcggagaataaactgataacgcataccgaacaggttcgtcgtggtattgctgaaagcgatatcgacttcgctaaagttgggtacacgcaggctgattcggttaccaaaggggaaattgcggataacacagaaattttcattaagccacaaaagcgtgaaaaggttaataccagcgataactcgcatcgtcagctcagttactccggtaatatccaagtggatgtcggtgaaggagagtttacggcgcttaattggggaacctcgaacgtaggtattaaagtgggaaccggtggttttaaatcgctggctttcggtgacaacaatgtgatggttcacattggtcatggtgatagcaaacatagcgttgatataggcggctatcaggcgcttgaaggggcgcagatgtttattggtaaccgtaatgtcagtttcaatcaaggacgcagtaatgacttgattgtgatgatggataaatccatcccaacgccaccgttggtcaatccatttgatgatactgcccgtattgctgaggtattgaaaggtattgctcgttccggtgaaacgcaggattggttagcggcacaagatcagcaatggacaattgccggagcgaggaagtttgtgcgtgatatgtctggtttagaccaaaccagtagcgtggattacaaaacgttgcttgatttggactcacaacatgaacgtagcagccgtggtttgcagaatgacgccgaatcagcactgaataagaaatttaatcagtggttaggtgaaaatggcaatagcattgaaatgggcaaaatgagccgggcagataaattccgtcaggctaatcagaagctggccttcaactttgctgttggcgggcgtggcgctgatattcaggtgacgaccggcaactggaactttacgttcggtgacaatattcagtcaattttggataccaatctgggttcactgtttggtctgatgacccagcaatactcggcaacgggtatggcgaaaacaaccttcacctataccccgcaggatttaccgcgtcagcttcagaataagctgcttggccgattatcggaggtgggggcggataccactttggcggatatttttggtgtggattacaccgcggatggacgtattgtttcccgcacgggcaagcctgttgatggcgaggcgatgctaaaagagatgctggaagtgataaaggaatttagcggtgatcaactggcagccttcaccaacccggggaaattgctggatagtttggaggccggcatcaaagcgggagaagatggggtcaggacatttgcggaaagtcatggtttgaaagagaaagcgcccgataaaaatcaggaacaaggcgcggtggttagcaccaacggagatagcgctcaagcgaataacaaagcagaacgtgcatttggctttaattcgctgaatttgcctaacctgtttgcaacgatgtttagcaaagataaacaagcagagatgcaatcattagtgaccaatttgaaagagaatctaaccgcagatctgctcaatatgaagcaaaaaacctttgatttcctgcgtaacagtggtcatctgcaaggagatggcgatattaatgtgtcgttgggaaattataacttcaactggggtggtgacggtaaagatctcggtgcctatttgggcgataacaacaacttctggggtggtcgcggtgatgatgtttattactcactaggaacatccaatatctttacgggtggtgaaggcaatgatatgggcgttctcatggggcgcgaaaactggatgtttggcggcgatggtgatgataccgccgtggtagccggacgtattaaccatgtctttatgggcgaaggtaatgaccagacgtttgtctttggtgaaggcggccttattgatgcgggtaatgggcaggattacgtcgtgacttccggtaactataaccgggtggatactggggcaggtcaggactacgcggtgaccatcggcaataacaaccgggttgatttaggtgaaggcgatgactttgccagagtatttggcaatgacaaccggatcgatggttattccggcaatgatacgattaagctgatgggctaccatgcgatgattaatggcggagaaggtgatgatcacttgatagccgctgcgatttcgaagttcagccagtttaatggcggtgatggacaggatttgttagtgctgggcggttatcagaacagcttccagggtggagccggtgtcgatagctttgtggtcagcgcagaagtgattgataaccgggttaacgatatcaacgcagaagatatgatcttgtttaatggtgttgactggaaagacttatggttccagcgcagtggatatgatttggtgctgtcagtgaaccgtcatactcaggataacactgctcaggagatctttgaatcggtgggttcagttacctttaatgattactttaatggtcatcgtgccaaattagtgacgcagatgggggataaagacaaatcgggcgagtatgaatttacggcactttctgacaatgcggttgattcattgattcaggcaatgagtagtttttccccgacagtgggcgataatggttttattgagagtctgggcagtaaggcgagagctgctgttgccacggcatgggccgatgtaactcttggcaagggaaaatttgcctaa

SEQ ID NO: 10481 - DNA, 396 bp, Photorhabdus luminescens; identical to SEQ ID NO: 6330

SEQ ID NO: 10482 - DNA, 447 bp, Photorhabdus luminescens; identical to SEQ ID NO: 6329

SEQ ID NO: 10483 - DNA, 522 bp, Photorhabdus luminescens
gtgattgaaatctatagtgacgagtattggatgcagcaggccatcgaacgagcaataaaggcgtgggagcagggggaaatacctgttggtgctatattggttgctgataataaaatcatctcggaaggttggaatcagtctattatcgcgcatgatcccaccgctcatgctgaaattattgtgttacgcaaagggggagagcggttacgaaattatcgtttgataaataccaccttatacgtcaccctcgaaccttgcactatgtgcgctggtgctatgatacatagccgaatacagcggctggtttatggcgccagcgatatgaaaactggcgccgtaggttctttggttgatatattgcgccatcctggcatgaatcatcaaattgatattaccagtggtgtgcttgctgaggaatgttcgacgatgttgagcgcttttttcaaacaacgtcggcagcaacataaagcattaaaagccgccagaaaacagcaggaagaaaatcaagattcactcttttag

SEQ ID NO: 10484 - DNA, 2307 bp, Photorhabdus luminescens
atgattaatttagacattaacgaacaaaacaaaattatggtcgtcagcagccatgtatttagaccgacgacggcgaatggtcgagcctttaccgagttaatagaagcattaaaaaagaacaatttcgctgttatcctggcggctacattccaagatggcatagctaccgtttcttctgattcctcactatgctgtatttttgttgattggacttcaggagataataactatgaatctcataaacaagtgttagaattactgaaagagatacgcaaacacaatacaaccattccggtattgttgaccgcggaatattccagcatcgacacactgacacttgaagtcatgggattggcagatgaatttgtctggatgcttgaagacacggctggatttatcgcctctcgcgccagttcgctaattaagaaatattatgcgcaattattaccgcctttcactcgtgcattactgcaatacactcaagaatcaccagaatattcctggactgctcctggacatcaaggcggtgttgcactgactaagacagcggcaggaagagaattaattaatttctttggggaaaatttatttcgaagtgatattggaatagaaagaaaaatacttggctcactgctagatcatacaggtgcgattaaagaatcagaagaatatgccgcaacgatttttggtgcccatcaaagctattgcgtgcttaacggcacttcgggttctaaccgtattatcatgggtgccgttattggtgagaaagagattattatatgcgatcgcaattgccataaatcgattggacaaggtttaataatgactggggctttgcccgtatatcttattcctcaacgcaaccgctatggtattattggccccattcccagagatcaatttcaaccagaatatatccaacaactcattgatcaacacccattaaaagcgatcgcaatagacaataagcctgtttatgcggtcatcaccaactgtacttatgatggaatatgttatcacgcagaacaagcacaagatttactagcaaaaagtgttgatcaaattcattttgatgaagcctggtttgcttatgcgcgttttaatcctatgtataaacatcgttactcaatgcgtgatgacccaaatgattttgacaataatggcccgacaatatttgccactcaatccacgcataagatgttagcagcgctatcacaatcatcctatatccatatccgcaatggcaaaaaacccattgaacattcccgtttcaacgagtcttatatgatgcactccacaacttcaccgctatattcgcttatcgccactaatgaaattgcagcggccatgatggatggcccacaggggcaaagactgatacaaaacgctatcaatgaagccgtagacttccgtctgacattagcaaaaacccatcatcaatttaaacaaaaagatgattggtttttcttaccctggaatgccagagagattattagcgcagatagcggtaaattaattcccttccatgaagcaaacagagaacaattagcaacggatccttcctgttgggtattaaaagagggagaaaaatggcatggatttaccaatctatcagcagaatggtgcctgctagatccaacaaaagttggtattttatgcccaggaatgaatgataatgatgaattgctggaaaatggcattccagccgaaattctttccgcttatctcagccagcatgacattgtgccggcgcgtaccaccgattttattgttctttgcctgttttctatcggcgtcaccaaaggtaaatggggaacattaatcaatgtattgttgaatttcaagaaacactatgacgctaatacttcacttaaacaatgtttgccaaaactcgcgaagcaataccctgaatattatgaaaacatggggctcaaagatatttcggataaaatatttgggtatataaaagaatatgaaatggatattgagcaaaagaaatcatttagccaattacctgagatagtgaaactcccccgacaagcacaccttgatcatatggcaggccgtactgaacatttaccacttaatgaactcgccgggcgcatatcggctgtaagtgtcattccttatccaccaggtataccaataatcctaccgggagaacgttttggtgatgaacatgccccccggttacaatatattcgccaactcggtgaatggaataacaagttccccggctttgaaaaaatcctggaaggcgcagagatgataaacggcgagtaccatatatgggtactaaaagagtga

SEQ ID NO: 10485 - DNA, 1347 bp, Photorhabdus luminescens
ctgaacatcagttggccgaataaacagcaggagcagattaacaggatcattaccagaggagagctacggatcagcaccattagctcacctctgatccatcttaccggtaagaaagaagccaatggatttgattacgagctggtacaacgctttgctaattaccttggcgtcaaattagaaatcaaatttagaaaaaatatcaatcagttatttgatgatctggaaaagggtgaggctgattttctggccgctggcctgacttatcatcaagaaaggctggatcaaacccgcacaggtccagcttactattctgtatcccaacaactgatttatcgcaaagggactccacgccctcgctcttttaaagacttaaaaggtaaactgctggtcgcttctggttctgctcatgccagcacattgaaaaagatagaaaaagagaattttcctgaactcgaatgggaggagacaccgcaatataacactcgcgaactactggaacaggtatcagaaggtaaactggattatacgttaggtgactcgattaatgtcgcgttgcaacaacgtactcaccctaatctggccgtcgcttttgatgtgagtgaagataacccgctgacatggtatttaaaacgcattgacgactacagcctttatgctgccatgctggattttttcagccagctaacggaaaaaaatgtcatgccacggttggaggagaaatactttggtcacgtccactcatttgattatttcgatacactctcttttctcagtgccatcgataatattctgcctacctatcagccactatttgaaaaatattccggtgatatcagttggaaactgctcgctgccattgcctggcaagaatctcattgggacccacaggcaatctcacccacgggtgtgcgtggcctgatgatgttaaccaaccagacggctaaagggttaggcgtcgttgatcgccttgatccggaggagagtattaaaggaggggcgatctatctgcaaaatctaatgaaacgactacctgaaaatatccctaaagatgagcgcatctggtttgcactggcagcttacaatatgggttatggacatatgttagatgcccgcaaactgacggcatcacagaaaggaaatcccgatagctggcttgatgtcaaaaaacggattccactattaagccagaaaaaatattatacaaataccacctatggctatgcccgtggacatgaagcttatcgctatattgaaaatattcgccgttatcagcttagtttagtcggatatttacaggccaaagaaaatcggaaaaaattaattccccaagaaaaccaaccaaaataa

SEQ ID NO: 10486 - DNA, 3897 bp, Photorhabdus luminescens
ttgattactatgaaaattctacgtggttcacctgctttatctgcatttcgtatcactaaactcctttctgtgtgccaagaacagcaacttccggtcaatgatatttatgcggaatatgttcattttgcagagattaatgcatctttgagtgatgttgattcagcaaagttacaacaattactaaaatatggaccttcgctggctgaacatgaaccccaaggtacattgctgttagtgacgcctcgtccgggaacgatttccccttggtcttccaaagcaaccgatattgctcacaattgtggcctgtcccaggttgtgcgtctggagcgtggcgtggcttattacatccaaagtggtgaaatgagtgatacacagtggcaaatattgtcatcattgctgcatgatcggatgatggaaacggtctttactcaattggaacaggcggaaaaattgttttctcgtcagcaaccggttccgttaaagcgcattgatattctgcaagcaggacgcagtgcgttagaaacggccaatattgaacttggattggcgttagcctcagatgaaattgattatctgatggatgctttccagaaattagggcgcaatccaacagatgttgaactttatatgtttgctcaggctaactcagaacattgtcgtcataaaatctttaatgctgattggattattgatagtcaggcgcagccaaaatcgctgttcaaaatgattaaaaacacctatgagcagacacctgattatgtcctgtcagcctataaagataatgccgctgtgatggagggatctgctgttggtcgtttctttgctagcgcggaaaacggttcatatgattaccatcaggagcaggctcatattctgatgaaagtggaaacgcataatcacccgacggcgatttctccttggccgggcgcatcgacaggttcggggggggaaattcgcgatgaaggggcgaccggtcgtggtgctaagccaaaagcgggtctggtgggattttcggtatccaatttgcggataccgggttttgaacagccgtgggaagaggattttggtaaaccagagcgtatcgttagtgctctggatatcatgatggaaggccctttagggggcgcggcatttaataatgaatttggtcgtccggcgttgttgggctatttccgtacctatgaagaaaaagtaaacagtcataacggtagcgaattacgtggttatcacaagccgatcatgctggctggtgggatcggtaatatccgtgatgaacatgtcaaaaagggtgaaatttctgttggcgcaaaattgattgtgcttggtggtccgtccatgaacattggattgggcggaggggccgcatcttctatggcatcggggcaatccgatgctgatctggattttgcttcggttcaacgcgataacccggaaatggagcgccgttgtcaggaggtgatcgatcgctgttggcagttaggcgaaaacaatccgattctgtttattcatgatgtgggtgctggtgggctttccaatgcgatgcctgagctggtcagtgatggtggtcgcggtggacgatttgagttacgtaaaattcttaacgatgagccgggaatgagcccgctggaagtctggtgtaacgaatcacaagagcgttatgtactggcggttgcgccggaacaactcccgctatttgaagagatttgtcggcgtgagcgtgcgccttatgccattatcggcgaggcaacggaagaacgtcatttgctgcttaatgatgaacactttgataaccagccaatcgatatgcctttggatgtactgttaggtaaaacgccaaaaatgttgcgtgatgtcactacattaaaagcgagcggtgagagccttgaacgccgggatatcgatctggcggaagctgttaagcgcatcatgcatttgccggcggtggcggaaaaaaccttcctgatcacgataggcgatcgctctgtcactggcatggtttctcgtgatcaaatggtgggtccgtggcagatcccagttgcggactgcgctgttaccaccgccagccttgatagctactatggcgaagcgatgtctatgggggaacgtgcgccggttgctttgctggattttgcggcttccgcccgaatggcggtcggtgaagcgctgaccaatatcgcttctgcttatattcaggatttaaaacgcattaaactttcagcaaactggatgtctgctgcgggtcacccaggtgaggatgccggtttgtatgcggcggttaaagcggtgggtgaggagctgtgtcctgcgctagggctgacaattccggtgggtaaagactccatgtcgatgaaaacccgttggcatgaccaaggtgaggagcgtgaaatgacggctcctttgtcactggtgattactgcttttgccagagtggaagatgtccgccgtacagtcacgccggagctttctaccgatgaagataatgcgttgttattaatcgatctggggcaaggaaaaaatacgctgggcggtaccgcattggcacaagtttaccgtctactgggtaataaaaccgcggatgtacgtagtgctgaacaattagcgggtttcttcaatgcaattcagcaactgattgcggaacaaaaattgctggcttatcacgaccgctctgatggtggtttactggtaaccttggctgaaatggcttttgccggccattgtggcattgaagctgatatcagtgtatttgatgaagatattctggctgggctctttacagaagagttgggtgctgtagttcagattcgagcatcggatagaggatttgttgaaagcattttggcagaacatggtctggccgattgcgtacattatttgggtaaagcccaagcaggtgatgattttgttatctttagtggtaatactgaagtctatcgccagaatcgcagtaccttgcgcttatggtgggcagaaaccacatggcaaatgcagcgtctgcgcgataacccggcgtgtgcagatcaggaacatcaggctaaacaggataatcaggatcctggactgaatgtaaaactgacctttgatatttcagaagatattgcagcgccttacatcttgcagcaggtaaggccgaaagtggctgtactgcgtgaacagggcgttaactcccatgttgaaatggccgcggcattccaccgagcaggctttgaggcgattgatgttcatatgagtgatttgttgtctggacgtattggattgagccaattccagacactggttgcctgtggtggtttctcgtatggtgacgtattgggggcaggtgaaggttgggcgaaatcaattctgtttaatgaacgtgtccgtgatcagtttgccgttttctttgcacgacctgatacgttagcgctgggtgtttgtaatggttgccagatgatgtctaacttgcgggaattgatcccgggtgcagaacattggccgcgttttgtacgtaaccgctcagagcgatttgaagcacgatttagtttggtggaaattactgacagcccgtcactgttcttacaggatatggtcggttctcgtataccgattgcggtttctcatggggaagggcaagtagaattccgtaatagacagcatcttgagatgcttgaaagcaaccagttagtggctttgcgttatgtgaataactatggtcaggttacggaaaactatcccgctaaccccaatggttcagtgaatggcattaccgcagtgactagccttgatggtcgagcaaccgtgatgatgccgcatccagaaagggtatctcgcacggtgaataactcttggcatccagatgagtggcgcgaagatggcccgtggatgcgaattttccgtaatgctcgtaaacagttagggtag

SEQ ID NO: 10487 - DNA, 243 bp, Photorhabdus luminescens
ctggaaacctttttatacaattttgaaactcgtgttcttaaatatcctaaaagtgctccgctatgtgaggaaacggctgatatcgggttaaccagccaccatgactatgtggataccaaattgcaactgcgagcaatctacaaaatagatgaagctaaccataccgtaattgctacactgttcctaaatacacgacagagtttacgccaagcactaatccaatattgcctgcgtagagactga

SEQ ID NO: 10488 - DNA, 273 bp, Photorhabdus luminescens
atgtatcaaaccccaaattcgcggattacgacagtctccgcgtttaaaaaagaattggcttctatggatgtatcgcagccagtcacagtaacccaaaacggggagccgttatatgtggttcaagatccggctcagtttgaaatgcaacaagaacaaatggcattgttgcgactgctgtcttttgctgaaaaagacataaaatctggacgaattgtgtcatctagtgaactacgaaataatttacggaaattagcaaacggtgatcataaataa

SEQ ID NO: 10489 - DNA, 288 bp, Photorhabdus luminescens
ctgagcaatgacgacgggataatagtttttgctactatcccgccagtgagggtgacttatgcctgttgtttatctacagtcagacataggtggtgcctcactccacgtgtcgcccgatgtttgataaggctcgaaagcgatatcactgagttggacggtaggcaccttactctggcatcattcgatagtttatgtggcatttctccacctaatgtgggccgacataagaagctgaatgagcaactgtgccagcttaatgcagattccatgccaacattaaaattttaa

SEQ ID NO: 10490 - DNA, 1497 bp, Photorhabdus luminescens
atgggtttttctatcagccctttgtcggttagcattggtgtactgacaggttacgagatgatttccttgaaaaaatggcgtttatttccgcgctcattgcgccaattagttgtcatggccttctggctggtgttattgccgctgttggttttggcttatcaggcttatcaaagtcttgatcaactcagtgagcaagcggctgatataaaccgtaccacgctagcggatgcccgccgcagtgaggctatgacaggtattgcgttggagatggagcgtagctaccgccaatattgtgtgttaggggataagacgctggaaaacctctaccaaaggcaatatcagcaataccttaagatgctgaaagatcagatggctatacttgatgagcaacaacatattaagacgcttaatagtttattgtcgcaattgacaaaaatcgcttgtctcaatagtgaacctacccaacctgccgctcaattacttgagcagttctccaatgctaatagccagatggtacaggctacccgtgatattattttcagccggggagaacagttacagaaagatattgctgaaaaagggcaattttttggctggcagagtcttattttatttctactgagtgcgttattggtcgcgttatttactcgcatgattatcgggccggttaaagggattgaacgcatgattaaccgattgggagaagggcaatcattgggcgttcgcatagattcttttcaggggccgcgagaactccgttctttggcacaacggattatctggctcagtgaacgcttggcttggttggaatcacagcgccatgagtttttacgtcatatttctcatgaactgaaaacaccgctggcaagtatgcgggaagggacagaattactggctgatgaagtggcagggccattaacggctgatcagcaagaagtggttgctattcttgataatagtagtaaacatttacagcaattgatcgaacaattactggattataaccgtaaactggcagatggcccgacggagcaacagcaagtttctctacgggaaattgttaatgaggtagttttatcacacagtttacccgcgagatcgaaaaatattcagacggaaatccagcttgatgctgatattttatgggcagagcctacgctattaatgcgggttattgataatctctactctaatgcggtgcactatggtgccgaatccggtaatatctgggtttcaagtcgtcagattggtaaatatgttcaaattaatgttgctaatacaggtacgccaattcctgaatcagaacgcagtatgatttttgaaccgttctatcagggaacgctccagcgtaaaggtgcagtgaaaggcagcggtcttgggctaagtattgcgcaggattgtattaagcgtatggggggcgaactgatattaattcagagcgaatttgctgacgtatgttttcgtattaaattgccattagctgctgagaatgaataa

SEQ ID NO: 10491 - DNA, 756 bp, Photorhabdus luminescens
ttgttattaccacgagtttcagttgggggttttagcatgatgctgctgatcttcgttgtttttttattggcgggttgcgttaaaaatccggttaataataatttagcgacagttacgcaaatggtaataccagagcaacgggtgacggattaccgtattgccgagtgtgggttaatgtgggatttagagacgccgccatcgattgagaatgcgctttactggctgcgactgatggattgttcagatcgcctgacatcagcgagagcacgtaatatggcgaaatacacgcttccggttacttgggatatggcttttaaacaaagtatcttacttaacagtgccgggcctacattgtctgagcgtcggaaaatgattgaaaacttcaacaaataccggttgaaattcccgaacccgttgcgagcgttattgcagttatggcgtgagcagcaagttcagcaaattgcagtggctgaggagcgggcaaaattccaaaaattacaggcagatacggataataaacttgatcgtctgcgtgaaagtcgcgcacggttggagtttgagctacagcaaacttctcgtaaactggaaaacctgacagatattgaacgtcagctctcttcccgtaaacaaaatcaggggagtgctggctcaggcaattcggataaacatgttgaaacgcccgagacgacggcattacctaacaaaaacagtacgccaaacagtacctctgaatcagataaaggagcagcaccatga

SEQ ID NO: 10492 - DNA, 1338 bp, Photorhabdus luminescens
atgacagcgcgtaaaccagcccatcttcttctggttgatgatgatcctggtttgttgaaattgttgggaatgcgtcttaccagtgaaggttttcgtgtcacaaccgcagaaagtggcggtgaagcgttgagattgctaactaaagaaaaaatcgatttggtgatcagtgacctgcgtatggatgaaatggatggtatggcactgttcgctgaaatccagaagcagcaaccgggtatgccagttatcattctaacggctcatggctcaattccagaggcagtagcggccactcaacagggtgtctttagttttctgactaaacccgttgatcgggatgcgctttataaagcgattgatggtgcattggcgttgaccacgcctgccagtgatgaacagtggcgggaacagatagttacccgcagtcctgctatgttgcgtttgttggagcaggcgcgaatggttgctcaatctgatgtcagtgtactgataaacggtcagagtggtaccgggaaggaagtgctagcccaggcaattcaccgtgccagtccacgggcgaaaaaaccatttatcgcgattaactgtggtgctttgccggaacaactccttgagtcagaactgtttggtcatgctaaaggtgcatttaccggtgcggtcagcagccgtgaagggttattccttgctgcgcaggggggaacgctgtttcttgatgaaatcggtgatatgccacaggctttgcaggttaaattgttgcgcgtattgcaggaacgtaaaatacgtccgctcggaagtaaccgtgatctggatattgatgtacggattatctcagcgactcaccgtgatttaccgaaggcaatggcaaaaaatgagtttcgcgaagatctctattaccgcctaaatgtggtgaacttgaaaattccagctttgaatggccgggttgaagatattcctttattggcgaatcatctgttgcgtgaatcagcgaaacgccataaaccttttgtccgtagtttctcagttgatgcgatgaaatgcctgatggcggcaagttggcctggcaatgtgcgtcagcttgttaatgtgatcgaacagtgtgttgcgctgactactgcgccggttattagtgaagccttggttacgcaggcactagaaggggaaaatacagcgttacccacttttgtagaagccagaaatcagtttgaactgaattatctgcgtaaattactgcaaatgaccaaagggaatgtgactcatgcggcgcgtatggcggggcgtaaccggactgaattctacaaattactggcgcgccatgaattggatgcgaatgattttaaagaataa

SEQ ID NO: 10493 - DNA, 1623 bp, Photorhabdus luminescens
atgagccgtactcttaatattgcccttgcacagcttaattggatgattggcgacattgaaggcaactgtgaacgtatgttgcagacagtacaggaacaacagcaacaaaatgctgatttggtgatgttttctgaactggcaatatccggttattctccagaagatctattattccgagctgattttcatcagcgttgccgtgagcaattggcacgtttacaggctgccagttgtcaaattgctattttagttggtcatccttgggagcaggacggggagatttacaacgcactttccttattctggcaaggggagatcttggcccgttatttcaagcaacggttaccaaattatggtgttttcgatgagaaacgctattttaaagcgggcgatcaaagctgtgttgtgccatttaagggctacaatctcggcttattgatttgtgaagatttatggtttgatgagccgattgatgccttgaaacaggctggtgcagacttagttctttctatcaacgcttctccatatagccgtgaaaaaccttatatccgttatgaactgattagagaacattgccgacgtacagagttacccatgatttatcttaatcaggttgggggtcaggatgagctgattttcgacggctgttctaaagtttttaatgcaagtggtgaagtgactcatcggttagccgcatttaatgaacaaatccaacaatgctgctttaatgaattaaaaattgaacctatggttaatccggcacctgaattaccgccattgcagcaggtatatcaggcattagtcctttcagtgcatgattacgttcgcaaaaatggctttcaaggcgtgttattaggcttatctggaggaattgactctggcttaacgctggcaattgctgttgatgcattgggtaaagagcatgttcaggccgttatgatgccattccgctatacatctgaaatgagtatagaagatgctaaaaaacaggctgatatgttgggtgttgagtttaatgtggtgtcgatcgaaccggtgtttgatgcatttatggcacaatttgaacctctatttgccggtacggccaaagataccaccgaagagaatttacaggcgcgttgccgtgccgttattctgatggcgatgtctaacaaacgccatcgtctcgtgctgacgaccagtaataagagtgaatcagcggtggggtattccacattatatggtgatatggcgggtggttttaatgcgctgaaagatgtaccgaaaacattggtatttgcattagcaaaatatcgtaatactgtttcgccggcgatacctcaacgagtcattgatcgtccgccatcggcagaattggcacccggacagcttgatcaggacagtttaccgccttatgacattctggatgatattctggaaggttatgtggaacaggataagtcggttgatgggctggtggcggcagggtttgatgaacaaattgtacgtaaagttgttcgtttggttgatatcaacgaatataaacgtcgtcaagctccggtgggaccgcgtattacgctacgtaattttggtaaagacagacgctacccgattacctctggtttcggccgtaaaaactggtaa

SEQ ID NO: 10494 - DNA, 339 bp, Photorhabdus luminescens
atgaaaaagattgatgcgattatcaaacctttcaaattagatgatgtgcgtgaagctctggcggaagtgggtatcaccggaatgacagtaacagaggtgaaaggttttgggcgccaaaaaggtcatacagagctgtatcgcggtgcagaatatatggtggattttctgccaaaagtgaaaatagaaattgtcgtgccagatgatattgtcgatacctgtgttgaaaccattatgcagacggcacagaccgggaaaatcggtgatggtaaaatatttgtatttgatgtagcacgtgttgtgcgtatccgcaccggtgagcaggatgaagaggcgatttaa

SEQ ID NO: 10495 - DNA, 885 bp, Photorhabdus luminescens; identical to SEQ ID NO: 7045

SEQ ID NO: 10496 - DNA, 1074 bp, Photorhabdus luminescens
atggaggtacatgtgactgattttcataactttgacgtttatttgtctcaaatcatgaattggcacttttcgcctgaaaccggatcgccgttttggcttgaaaaacgcaaaatattggatttcgatccattgcaagatatacgtactttctctgatttaaggttatttcccgatattgctgatgaacttcgggatgttccgactgaaagcttggtgcctcgtggtttgcagaatgcggccattgcgggggtatttgaaagtggagggacgacaggacgacccaaacgtgttgtcgtctttgaagagtggttagagcagttagtggcctggcgtttgagtgatatgaaagtcgttaatacgggggcaataaagaataccttggcgctggtcccttctggtcctcatgttatcggggcaataagccgtcttcgtgctcgtgctaatggtgggcatttcttcaccgtggatttagatccacgttgggttaaaaagatgatccaacaaggtgatcttgccgggatggaggcttactgcgagcatattctcgatcaggctgaagatattattaatagacaaaatattagttacctaattgtcacgccgccacttttagaacgaatggttaggagagcggcgttggtcagtcatttgaataagagtttggaccttattgcttggggtggaactcacatggacccagatacacaggcatttttgcaatcctcaattttccctgatgtcaaaataacagccagttatggcagtacaatgatactgggcgaatctaaatcaagagataatcaggattttgaagggtcacctatctttgacagctttgcccctaacgtcctttttgaagttatcgatccactgacgcaaaaaccggttccttttggggaacgaggtcgggttgtaatgaactacatcaacaagtttgctttatttccgaatatcttggaacgtgatacagcggtgaggatgccaagaatagatgattacccaggagtttccgttacgctggtgcgtcctgttgaggagatttctggtcatgcggtaatagaaggggtctattaa

SEQ ID NO: 10497 - DNA, 1392 bp, Photorhabdus luminescens
atgctaatcgatagtgtgaagcctgacgtaaaaaccgcaatggagaacaaattgcaacaagtggaggctctcgcactgggagaatcctatgttacacgccggcgtgcggctgttatcaacgtgttagatgaagttgttggagaaactgcgatagcgcctcccgtttatatttgtgaagttgttcgcaagatgagaattgccccccgactgaggttggatgaaattcatgcaacaatgaagcaggcggcaaaaatttattccagtgagagtgtcgccgggctttctccggcagaatatgtgcaattgacacaccgtgtcattgggctgccagcgagtattatcgaaaggtcactgattgaaacttcagaagtgcttatgatgatgtctgagataatcaaagcatctatgccacatggcgctatttggcatgtggatgatagcagagttgcagaaggatgtgctttattcagccgacgagcggatgtgctggctgttctgactggtggtaatgggccgggagcgcatgctttgtggccgcaagctcttgcttttgggtatcgaattttaattaagccttctgttcgtgaaccattcaccgctcaacgattagtctcctcattgcaacaggctgggctcggaaactatgttgcgctcataccgacagatcatcaaggtgctgacgaaatggtttctgcggcagatctgtctattatttatggcgggcaagatatcgttaataaatatcattcgaatcctaaagttttaatccaaggaccggggcgttcgaaaattgtggtaggttcagatgtcaatattgatgaagcagtttcacttgttgcccgatcggtcagtgctcttggtggtaccgcatgtgtttctgccagcgcggtattaatagaaggggaccctgttgattttggtcaacgtttatcggaagcgtttgatcagatggatgctgaggagacatttccattagggtcatcgaataccacggctttattacagaaatcactttatcctgaaaaaaatgaagatcttcggttgtttggtgaacaaacatcatcaggatatatccttagaccttgcgttactgttgtcgataatccaatagatcctttaattcaacgcgaacttccatttccatgcgtcactgttgcaccttatgaccgtttgaagagttcacaaatgttatcagattcgttagttgttactgtattctcgaaaaaaccagaaattctgggtgccgttctgagtaatacaactatcagtaatgtttatgcaggagatattccgacaacctggatggcaccacttgtaccgcatgacggatatttgtcagaatttttgatgcatagccgaggggttcgtattcagaagaattggtttacttaa

SEQ ID NO: 10498 - DNA, 1128 bp, Photorhabdus luminescens
ttgcttatggctaatgatttaaatgtggaacgaaccgggctggtttttactcttacggccggtaatctccctgtgaaaacttttgttgtggttgaatttacactgaatgaagtcttgtcaatgctattcagtttgcaagccacagtgacttgtgccaattcagatattgattttgcggatattttggatcaatacgccacattgaccgtttatcgtgatgggcagcctgagcgttatatcaccgggattgtgactcattttgtgcaggaaacaacgggccgttatcgtagttgttattacttgactctccacccttccttgtggcgtgccggattgcgggttaactctcgaatttttcagaataaatccgtcaccgatattattgataggctattgaaagaaaatggcgttcggcaattctcttgtctattgcgctatgaacatcccgtgcgggagttctgtgttcagtacgatgagagtgatttggcttttttacagcgtctgttagctgatgaagggatcttttattactattactttgatcaggataagggcgagccggcaatgatttttgtcgactcttataccaagaatggttctctttcactgccctacaacccagaacctgatgttacaggcaaccagtgttgcatcagccagtttcgttggggagaacgagtgggcattgctgaaatttcggtgagagattacacatttaaacatccccggtggctttcagattttcaattccatgaaaatcacaggtacatcggcaatcagcgttcggatttaaatagctactattactatgactttcccggacgttataaagatggaaatgggcagcgaataagtcaataccggttggaggcattgcgtaatgatgctttgcttggcagtgggcaaagtgacagttttgctcttttaccgggcatgtggtttacgcttaccgatcatccgaaagaaaaatttaatgcgccgtggcaaataatccaaattactcaccgcggtcatcaacctcaagcggatgaatcccattttggtagcagagggacgactttgacgaacggttttacctttggtagtcccaatttctccgtgaggctaaagaggtttattcgcatgtga

SEQ ID NO: 10499 - DNA, 261 bp, Photorhabdus luminescens
atgcttagccagtatcgttggtcaataaaaatggccgatctctctcatctgtcatccgaacaggctgaagctgccaggagatttgtcgatctcaagtttcaggtggatacgatggcaagagatcaccggatgacctgcatggcactatgggtggcggtgagtacggcccatctcacggtatgtgtttcttcaatagaatcattccttttctgccctgtgattctgaggttcatgagccggagatcctgtatgtgccgatag

SEQ ID NO: 10500 - DNA, 588 bp, Photorhabdus luminescens
gtgaagggaaaaaccgggttaatttctgccgtcatcacaacattagcgctattccatcccatcattccgaaggctgacagaataaagctttatgtcaaagaggaagccgctggtagagacgttttggctgttctagataatcgctatgttcagaaggttaaccattatgcgtttgcactaccggtccttcaggcttatggagtcatcgtatcacgtaagtggcctagtgacttaccatcaacggatgatatccgggcttatgctagcacctctgttaacaacaagcttttttaccggccggtagtcgatctcgataaagtcagagtagcgttcactaagaagaaggagggggaagagttcatccgtaccacgctttttcatctcctcccagtccgtaaaaaatttacccatatcttcgtgttcatgctgatttttgtggtagcgatgactctgtgggatcacctcggtgaggggaatgtcgcgaatatgttgcttgcagtaggggcttttgctgtcggcagcatgtttgtcatgatggtaccggtttttcaggtaaggaaaaaatacttgactgatgaaagtcagtga

SEQ ID NO: 10501 - DNA, 1008 bp, Photorhabdus luminescens
atgggatgtctaaatgtactcattggtgccaatggtgctgggaaatccaatttcatcagtttttttcgtctaatcaccgttgtacttgatcatcatttacaatctcttgttggcaaaatgggtggccccgacacattattgcattttggtcgtaaaaaaactgagtctatgagcactgagctttattttgatcacaatggttataagtttgaactggaacccacaaatgataaccgtatgatgttccaacatgaatcactctttttggacatcaaaggggattttaatattggtgctggacactttgaatctcagatcggtcagcatcataacattgaggattacgcattacttactatgctccgatggagggtttaccatttccatgatacgagtgataatgctagagttaaacaaactcatcgtattaatgataatgactatttacgggaagatggtgctaatttagcggcattcttatatcgtctgcaaaaaaatcatattctgcattacaaacgcattgtcaaaaccgttcaaatggttgcaccattttttggtgatttttacttgcggcccaccccggataatactgattacattcaactcgaatggacagagaaagagcaggatattccctttaaagcgagtgaattgtccgatggtactttacgatttattttattgactaccgtgttactgcaacccgaagattatatgccaagttcaattattattgatgaaccagagcttggacttcacccctatgctattaatgtactggctggtttgatcaaaaacgccagcagtaagcaccaactgattatttctacccagtcagtcgaactggtcaatcaatttgatgctgatgatttgattatcgttgacaaacaacaaggggaatctacctttaagcgtctgaatagtgactttctttcagaatggcttgaagactatagccttggtgaattatggaagaaaaatttactcggcgggaggccacagcgatga

SEQ ID NO: 10502 - DNA, 651 bp, Photorhabdus luminescens
atgatccgtatcaatgtttttgtagaagggcaaacggaagaaacttttgtgcgggatgtgttagctccctattttgtagcacagcaaatctatctgacaccaatattagttcagacgagtaccagtcagaaaggcggtattacaagttatggtaaggtaaaatatcaaattactcgcttatgtcgacaagatcccggtgcattcgtcacaacattaattgactactatggcctgcctactgatttccctgattataatgaacaacaggataatgcagccaacgaacgggtagttaagctagagcaagctttcgctaatgatattgggcaaactaattttattcccaatctgttattacatgaatttgaagcactattgttttgccaacctgaaaaatttgcggattggcttgatgacaacgcccccatttcagtattacaaaccatcaaagctcaatttgatagccctgaagatattaataatagcccacaaactgcaccatctaagcgtattttggcgatagtacccaattaccataagaccttacacggcccactcatcgccggtgatattggattagatacaattcgttcccaatgcccacatttcaatcagtggttaaataagctaactaacctcagttttgtttag

SEQ ID NO: 10503 - DNA, 1026 bp, Photorhabdus luminescens
atgaaaatattcattaccgatgaacaaaaagccgaacttgaacatctccatcacacctgccgtgataagagggagtgtgatcgcatcaaagcggtcctgctggcctctgaaggctggagttcagtgatgatcgctcaggccctgcgtcttcatgaaatgaccgttaaccgccatatcagtgattaccttaatcaaggtaaacttaaatctgataatggagggtctgatagtttgctttcccgagaacaaactgattttttaatcaatcacttatctcaacatcttttccatcacacccatgaaatcgtggcctatgttgctcagctctggaatattacctttagcattcccggcatgaataaatggctacaccgtcagggtttttcttataaaaaaccttgtggcgtccctcataaattcgacgcagaaaaacagcgacaatttattgaatattatgagaatcttaaagtcacagcgaaagacgaacccatcctttttcttgatgctgttcacccgactcaaggcaccaaactcagttatggctggatgcgaaaaggcgagaaaaaaaccgtcaaaacaacaggaagccggactcgcctgaatatattgggcgccctcaacctgaatgccattggtcgtacggtgttccaggaatatcagaccatcaacgactacaacatttgctgttttttcaatgaaataagaaagtcttatcctgactatcatcaaaaaattcaccttattgtggatggagcgggttacaacaaagctcatcttgtgaaggagtgggcttatgttagcaatattgagttacattaccttcctccctatagtccaaatttaaacccgatagaacgattatggaaggtcatgaatgaacaggttcgaaataaccgttatttcgcggataaacatgaatttcgagacaacgtcttcaaatttttcaccacaacgctaccggatatagcggactcgctgatgtctagaattaacgaccattttcaggtgctaaaaactgcatcttga

SEQ ID NO: 10504 - DNA, 156 bp, Photorhabdus luminescens
atggataaccaagagaagtttaaagccatagaaccagcctgtactgctttttcctcgactcactacgtcatcaaagacccgacgcaagttatggcataccgctattctggtcgaatcaataaaagccatctttgctgtcttagccttgggcaatga

SEQ ID NO: 10505 - DNA, 321 bp, Photorhabdus luminescens
atggcttttctggttaaagcagatcgtacaaccaaagaggtttttgccgaggacttcccggcaaataagggcatggagggcgagtttgatgttcaggatctcactaattttgtgggcgggtatcttgaaatggtaacgctgcggccaccgctaaacatcaacggaaaagaatactgctatatgctttgcgatgaagacggtaagcggaaagagtatccggtcaattacatcgcgtgcgagtatcttgtcggttcccatttagtaggaagtgactttgttgtaggtgatgttgtgttcctcgaacgacacgaaatttcatga

SEQ ID NO: 10506 - DNA, 582 bp, Photorhabdus luminescens
atgtcacgagtttttgcctactgccgggtctccactctcgaacagaccaccgaaaatcagcgcagggaaattgaggcggctggttttgccatcagaccccagcgactgattgaggagcaaatcagcggttcggtggccgccagcgaacgtcccggttttgcccggttgcttgatcgtatggaaaatggcgacgtactgattgtcaccaaacttgaccgtctggggcgcaatgcgatggacgtacgaaagacagtagagctgctggcaaagtcagatattcgggttcactgcctggcgctgggcggagttgatcttaccagcccggcagggaaaatgaccatgcaggtcatttcggcggtggctgagttcgaacgtgatttgcttcttgaacgcactcattctggtattgccagagcaaaagtggcaggaaaacgcttcgggcgtccacctgcattaaatgaggaacagcagcaggcggtgatcattcgtctgaaagctggagacagcatcagtgctgttgcccgtcagttcagtacagctcggcaaaccattcacagaataaaagccgggatgattttataa

SEQ ID NO: 10507 - DNA, 1395 bp, Photorhabdus luminescens
atggtatcgttaacaaaaaaacaaaccgcacagctttcagagatgggtcatgacgtgctactcaatatcattcatgacctgatacaggataataaacaggccaggaacgcactggtgaacgggtatctgttatcggcagcggaggtactcaaagccgtcgagaaggagtatgtccgacgcgccaaaagcaaacgtttttatgattactatgatgccgatgccttttttgacgagctgacacgcagtatagcgaccccccttgtgggtatcgcccacgcgctccccgagcaggtggaaagtctgagcgtaaaaatgatgcttgagttcgaaaaattcaccggtaacgtggacacctccagcggaagttggatggactactacaccattttgttggatgcgtggatgaaatcactgggagcgcaaaaaaacaacgatcctgcattcattgctaaaaaaatattcaccgttgttgaaagagaattttattttgggattgaaatctttaaaaaataccgcgccttactcggtacagatattttacgtataattcgtgacatgtattatcaaaaaaaactccaccgggaagctttgggtctcagcatgataatgaaagacttggattttctgacgatggcgtttaaaaacgatgagttttgccattccacccattattttgattatgccagattacttatggaagaactgcggtccgatgatgcactcgccgtattaaaaagtcagcggaatgacgatgaggatatcacagataatatcatatggaatgaactattcattcaggccctgattgaggaagggagaaaagaagaggccaaagcccactgtattacagcattcacctttcaaggtgatacccgtttttatcatctgtacacaaaagctgctgaaaaagatgtcgatcacagcccggcattcctgaaaatagcaaaagatacaggattagcgccatatgtctgttttgcatcagacattgaacggtatgacttaatcgacgcctgcattatgggcacgccaaaaaacaacctcgccgactcgctggcttatatcacccattcatatttacggacattatccagtaccctgtataaacacggctatgcgcatacggcgacccttttgcgccgctttttggtggaggacaacattcagaaatcaaaaagcaagtattacagctatgccgcctcagacatgaaaaaagccatcgattatggcgaaggtctggaggattgccctcagcttccggaaacagagggctacctcagaactctctacgaacaacataaacgtaaaaccgcactctggccgctgatgacagataaaatcaaaggattatccgtaggaaaggacggcctacgctacagcggagatgcctcatga

SEQ ID NO: 10508 - DNA, 423 bp, Photorhabdus luminescens
atgacatcacaggaactgtatgaccacgcggtgtcactgctggcaaggcgggattacgcatccggtgagttgacacgggctctgagtaagatgacggaaaacagagagaatatcgacagggcgttgtcgagactgggtgagtgtggttatctggatgataaccgcctgattgataaacatgttcgaaaaaaacatggcccggccagaatcaaacaggagatcaggcaaaaaggtttttctcaggagttggtcgagcagatgctggagaaagtggatgtggactggtatgccatggcaagggacctgaaagtcagtaaatttggtgatgcggtggtatcagaagccaaagaaaaaaacaaacagattcgctacctccagtacaaggggttttcgatggacatgatatttgaggcgttaagctga

SEQ ID NO: 10509 - DNA, 168 bp, Photorhabdus luminescens
atgaacgacttcgtttctggatttgagaacaatttgttcgtggccctgcgctatctggaacatcagcaacaaaaatgtggagccacaccgtcgtattcaggccaaactgtagcgtcttttgtcggagtaccgtccaggttcctctttactatgaacaagggaaaataa

SEQ ID NO: 10510 - DNA, 1191 bp, Photorhabdus luminescens
atgctggataaccaaactattgcaactgtcaaatcaactattcccctactttccgcgactggcccaaaactgacagcacatttctatgagcggatgtttaaacataatcctgagttgaaaaacatctttaatatgagccatcagcttaacggcgatcaacgtgaagccttgttcaatgcgatctgcgcctatgcagccaatattgataacttaaaggtactactacccgcagtggaaaagatcgctcataaacacgcgagtttgaatattcaaccagagcattatcagattgtcggtactcacctgctggcaacgttgaatgaaatgttccagccgggaaatgaaattctggacgcctggggaaaagcttacggtgtgctcgctgatatttttatcaatcgtgaagagcaaatctatcatagtggtgaattaacagatggtggctggcgtggtttacgcccattccgtatcaaccggaaagaagtaaaaagtgaggtcatttgcagctttgaatttgcaccacaagatggtgggaaagtaatggactataagcctggccaatatctaagtatttatctgcaagatgatagttttgctaaccgagaaattcgccagtattcactaacggcagcaccaaacggctccagctaccggattgcgattaaacgtgagccacaaggaatcgtttccaaccatatgcacgataagatgcaagaaggcgataccgtctggctgaccgccccacgcggtgattttttccttgatattaaaccagaaacgccggttactttaatttctgcgggggttggcctgactcccatgatgagcatgttgtatcacctccaccagcaaaatcacaatagcccgattaattggttacatgcggcggaacacggcggtcatcacgcgtttagccatgaagtcgcagcgatcgcgcaagcaatgccgaattttgctggcacaatttggtatcgcgaaccaagggatgaagatcaacaaggtattcattatcaacacaaaggttttatggatctgacggttctgaatgaggcgttgaaaacagaaggaatgcatttctatttctgtggcccagtcgcctttatgcaatatgtcgcgaagcagttattagatatggggatagataaacaatttattcactatgaatgttttggtccacataaagtgatttaa

SEQ ID NO: 10511 - DNA, 1254 bp, Photorhabdus luminescens
atgttaaagcgtgaaatgaatattgctagttatgatcccgaactatggcaggcgatggagcaagaagttgttcgtcaggaagaacatatcgagttaattgcttctgaaaactataccagcccaagagttatgcaggcacagggctctcaacttactaacaaatatgctgaaggttatccgggtaaacgctactacggtggttgtgaatatgtagatgttgttgaacaattagctatcgatcgtgctaaggcactgtttggtgctgattatgccaacgttcagccacattctggttctcaggcgaatgcggcagtttatatggctttgctgcaaccgggcgatacgattctggggatgaatttggcacatggtggtcatttgactcacggctctccggttaacttctctggtaagttatacaacgttgtgccttatggtatcgatgaaagcggtaaaatcgattatgacgatatcgcggcacaagctgaaaaacaccagccaaaaatgattatcggtggtttctcggcttactccggtgtggttgattgggcaaaaatgcgtgaaattgcagacagcattggtgcttacctgttcgttgatatggcacacgttgctggcctaatcgccgcaggagtgtatcctaacccggttcctcatgctcacatcgttactaccacgacgcataaaacactggcgggtccacgtggtggtttgatcttggcaaaaggtggcgacgaagagttgtataaaaaactgaactcttctgtattccctggttgtcagggggggcctctgatgcatgtgattgcaggcaaagcggtggcattgaaagaagcaatggaaccagaattcaaagcgtatcaacatcaggttgctgataacgcgaaagcgatggttgaagtgtttttggctcgtggttacaaagtggtttctggtagtacagaaaatcacttgttcctgctggatctggttgataaaaacatcactggtaaagatgccgatgctgcattgggtcgtgcaaatatcacggtaaacaaaaatagcgtacctaatgatccgaagagcccatttgtgacttctggtgtgcgtattggtacacctgcgattacccgccgtggctttaaacaagccgaagcacgtgaattggctggctggatgtgtgatgtattggacaacatcaatgatgaagtgaccattgaaatgattaagcagaaagttttggctatttgcgcaaaatatccggtttacgcataa

SEQ ID NO: 10512 - DNA, 1146 bp, Photorhabdus luminescens
atggttattcgatcgacgcgctggctggcgttagattacttcacatatttcttttcttacgggatatttttacctttctgggcaatctggctacagggtgaaggtatagagcacgatatgataggggttctattgggtgcaggcttgatttcccgttttttgggcagtttattaattgcacctacagttaaagatcccgcaaaacttatttttgcgctacgtatatcagcattgataacctttgttttcattgttggctttacattaggaaatcattgggcgtggctcctgttcgtcatggttggcttcaatctatttttttcgccgatgatgccactgagtgatgcgctggcgggaacatggcaaaagcaatttccttttgattacggcaagatacgggtttggggttcaattgcctttattatcagttcagcattaaccggggaattaatctctgtctggggacatcgtgccatcctcatcacgatattgtttagcgtcttctctacgctgttggtgacattgcttaggccctctatcatgccggttggtgaaaccaaatctgccaaagtggatgtcgtgtcatttaaacagttgttgtctgaaaaatcggtacgtcgattcctattatgtgtggctttattgcaaggtgcccacgcgggatattacagctttagtgcaatttactgggaaaacgcgggctattctgcctcggtagtcggttatctttggtcattgggcgtagtggctgaagtcattatttttactctgagtaatcaattatttcggcgctggagtgcccgtaatcttctgctgctttccggtatctgtggtgttgttcgttggggattgatgggaacatacacttcattgccggtgttaattatcgtccaaatcttgcattgtggtacgttcactgtctgtcatttggcagcgatgcgttttatcggtgcgagaaaggaaggggaaattgtgcgtttgcaagcggcctattctgcactggcaatggggggcggtatcgctgtcatgacggtaattgcaggatttatgtatgattatctgcacagtggaattttctggatgatggccttagttgcttttcctgctatcttcttgcgaccgcaggttaaagctcataattattaa

SEQ ID NO: 10513 - DNA, 948 bp, Photorhabdus luminescens
atgtcgaataaattaacaataaaagatatcgctcgcttggctaatgtcagtaaatcaaccgtctcgcgagtattaaacaatgagaatagtgtcagcccacaagtacgtgaaagagttgaaacgattatccaacaaaataattttattccttctaaatcagcaagagcgatgcgagtaaagagtgacaaaatcattgctttaattgtgtcgcgtctgggatctttttcagaaaatttatcgataagtgccatgttacccctgttttaccagcatggttacgaccccattattatggaaagtaattttgatccacagcttttacaggaacatctacgtcagttggcattacgtcatgcagatggcattattttgttcggttttactggattgtcagaagagtctctcttcccttggcgtgacaaaatggtggtatttgctcgtgaatataccggtttttcttctgtatgttatgacgatattggtgctgtccgtttattgatgaatgaattctatcggcgggggcacagagagattagttttcttggtgtagatgattgtgataccacgacaggttttcttcgccatcaatcctatctggcttgttgtgaacagcaaggtttgcgcccgctttctgttcaatgtgatttaagctatcagagtgggtttcaacatattaataaggtattgagagagaaaacgacagctttaatctgtgcaaccgatagtttggcattaggtgcatataaatatttgcagcaaaatagtcgggaagatatacaaataggtagtattggtaatacacctttattgaattttttataccctaacacggtttctattgatttgggttatagtgaggctggtaaatatgcatctgatcaattaatttctcaaataaatcgtcaatacttcaaacaaaaagtaatcattccgagtaagttggcttaa

SEQ ID NO: 10514 - DNA, 1422 bp, Photorhabdus luminescens
atgaaaaacaaaataaattctaaagatatagaaaaactaattacattaatcggtggttgtgaaaatatagccagtgtaactcattgtattacccgattgaggtttatattagttgaaccagttaaagccaagccggatgagataaagaatttatcgatggttaaaggctgttttaccaatgctgggcaattccaggtagtgataggcacgaatgttggtgattattatcaggttttaaatcgttatcttgaccaatctgaattgaataaaaaagataaacagcaggttgagaagaaaaacatgaaatggcaagagcgtttcatttctaagtttgcagaaatattttttcctctcttaccagcattaattagcggtgggcttattctaggtttccgtaacattattggtgatattccttttagtgaaggcaaaactttagctcaaatatatcctatttggaaaacgatatatgattttttatggctgctaggagaggcaatatttttctatctgccagtgggtatttgttggtcggcggttaggatgatgggtggaacaccgatattgggtattatattgggagtaacactggtctctccacaattaatgaacgcttatcacatagggcaacaaatccctgatatatggaatttcggcttgttcacgattgggaaagtgggttatcaggcgcaggttattccgtcacttttggcgggtattactttggggtggattgaggttcagttaaagcgggtggttcctagttatctctatttggtgattgttccggtcgtttcgttaatattggcaacctttttagcacatagtcttattggaccatttggtcggttactgggtgatggggtagcttgggttgtgaaggcgttgatgaccggaagttttgctcctattggtgcagctttatttggattcttttacgcgccgttggtgattaccggcatacatcagaccacattagccatagatatgcagatggttcaaagtataggtggaacaccgatctggcctattattgcattatccaatattgctcagggatcggcggttgttggtattattttagtcagtaagaagcataatgaacgtgaattatccgtacctgcggctatctccgcctatttgggtgtgactgagccggcaatgtacggtattaacattaaatatcgattccctatgctctgtgccatgattggctccggtttagctgggttgatttgtgggttgagtggtgtattggcaaacggtattggtgtgggtggtctgccaggtattctttcgatcaaaccgcaattttggctaatttacgcattagctatgtttgtcgccatcattgttccgttgattctcacgactgttgtttatcgcaggaagaatatggccggtatgttagcggttgaataa

SEQ ID NO: 10515 - DNA, 1662 bp, Photorhabdus luminescens
atggacaaaatcattccgtggtggttacaaggtgtcatctatcagatatatcctaagagtttccaggatacgacgggtagcggaacgggcgatcttaacggcattacttaccggcttgattatttgaagaaactgggcgtagacgctatttgggtgacgcctttttacctctcaccacaggtagataatggttatgatgtcgctgattattatgcgattgatccggcttacggctcaatggatgattttaagcgtttggttgatgaggcacatcaacgtgatatccgtatcatcgtggatattgttttcaaccatacatcgactcaacatccgtggtttaaacaagcacaggatattgatagcccttatcggcaatattacatttggcgggatggggtacctggaaccccgcctaataattggttgtcgaaatttggtggcaatgcttgggcgtggcatgaagcaagccaacagtattatttgcacctgtttgctgttgagcaggctgatctaaattgggaacatgagccagtacgggctgaattgaaaaagatttgtgaattctgggctggccttggtgttgatggcttccgtctggatgtcattaacttggtttctaaacagcaagacttccctgagtcaactcagggggatgggcgtcagttctacaccgatggcccgcgtattcatgaatttctgcaagaaatgaacagagaggtattccagcctgccggagtgatgacggttggggaaatgtcttctacttcactggaacattgtcatcgctattcttcattggatggtgaagagttgtcgatggtttttgcttttcatcacttaaaagtcgattaccccaatggtgagaaatgggttgcagcgccacctgattttattgaattgaagaaaatttttgccaagtggcagcaaggtatgtacgaacgggcatggaatgcgctgttctggtgtaatcacgatcaaccgcgtattgtttcacgctttggcggtgaaggtgtttggcgggtgccgtccgctaaaatgttagcaatggtactgcatggtatgcagggaaccccttatatctatcaaggagaagagctggggatgactaatcctcacttttctcatattgaagagtaccgggatatagaaagtttaaatatttatcaagagaagattgagcagggcaatgataaacagcaaatcttatcggtcttagcgaagaaatctcgtgataatgggcgaacgccaatgcagtgggatacgactgctaatgcagggtttactcaaggagagccgtggatagcgctgaatagtgattatcaggatgtgaatgctgaaaatgcgatgcaggatgatgattcagttttccattgttatgcacgtttaatcaagctgcgtaaggaatatcctgtattgacttatggcagctatgaagacttattaccatctcatccttctctttggtgctatgtgcgtcgttgggaaaatcagacgttgttggttattgctaatctcagtgttgaagtgcagaaatggtcgctggacgcttctttatccgattgctcatgggttaaattgatggggaactatcctgaaaaccatgtacctgcaaaagatatgcagctacagccttatgaagccgtttactggttagcggagtaa

SEQ ID NO: 10516 - DNA, 804 bp, Photorhabdus luminescens
atgcatccgatgctgactatcgccatacgcgcagcgcgtaaagccggcaacctaattgccaaaaattatgaaactcccgatgcggttgaagctagccaaaaaggcagtaacgattttgttaccaatgttgacaaagccgcagaagcactcattatcgacgttattcgcaaatcttatcctaaacactcgattattaccgaagagagtggcgagcttttaggcgaagaggctgatattcaatgggtaatcgatccactggatggcacgactaactttatcaaacgcctccctcacttcgccgtctctattgcggtacgcattaaaggccgtactgaagttgcagttgtttatgacccaatgcgtaatgagcttttcaccacaacccgaggtcaaggggcacagttgaatggctaccgtctacgtggtaccaatgcccgtgatctggatggcaccattctggcaacaggtttcccatttaaagcaaaacatcattccactgtttttattaatactttaggtaaattatttgttcgttgtgctgacttccgtcgtacaggctccgccgcactggatctggcttatgttgcggctggtcgggtggatggttactttgaaattggcctaaaaccgtgggattttatgggtggcgaactgttagttcgtgaatctggcggtatcgtaactgatttcgttggcggtcataattatattcattccggcaacattgttgcaggtaatccacgcgttgttaaagatattttggctgaaatgcgtgatgaattatcagaagcattgaaacgttaa

SEQ ID NO: 10517 - DNA, 726 bp, Photorhabdus luminescens
atgttagaaaatatccgcattatcctggttgaaacttcccacaccggaaatatggggtcaaccgcccgggcaatgaaaacaatgggattaaccaatctttatctggttaatcctttagttcagccagactctcatgcgattgcactttctgcgggtgctagtgatgttattggtcatgcgacgattgtcgatagtttggataaagcgctggcgggttgcggcttggtgattgggaccagcgcccgttcaagaacgttatcatggccgatggttgaacctcgtgaatgtggtgaacgtagtgttcaacaagctgaacatgcgtcggttgccattgtttttggccgtgagcgggtagggttgaccaatgaagaattgcagaagtgccattatcacctgaatatcccaactaacccggagtacggttcattaaatctggcaatggcggttcagcttgtcagttatgaaatccgtatggcctatttggcgcgtcaggataaaactgagcaaaaaactgatgaagtggaatatccattagctgatgatatggaacgcttttatcatcatcttgaatgtgtgttaaatgattcgggtttcattagaaaagcacacccaggtcaaataatgaatagattgagacgcctttttacccgtgcccggcctgaaatgcaggaactgaatattctgcgtggcatcttgtcctccgttgaaaaatgggcgaagaaatag

SEQ ID NO: 10518 - DNA, 495 bp, Photorhabdus luminescens
atgagattgacatctaaagggcgttatgcagtaactgccatgcttgatgtggcgttacactcacaagaaggtccggtaccattggccgacatttctgaacgtcagggtatttccctctcctatcttgaacagttattttctcgcctgcgcaaaaatggtctggtttcaagtgtccgtggtccgggtggtggttacttattgggcaaagatgccagtgaaattgttgttgccgaagtgattttcgcagttgatgaatcagtagatgctacccgttgtcagggtagagaagggtgtcagggcggtgatcgctgtctgactcatgctttatggcgcgatttaagtgatcgtattaccggtttcctgagcagtatcagtttagaagaattggtcaataaccaagaagtattggatgttgctggtcgccaggataacgataaacgccgtgcacctaacggcagagcacaagaaacaattaatgtcaatctgcgcccataa

SEQ ID NO: 10519 - DNA, 1215 bp, Photorhabdus luminescens
atgaaattacccatttatttagattactcagcaacgacaccggttgatccgcgtgttgctgaaaagatgatgaactatctgaccagggacgggatatttggtaatcccgcttctcgttcacatcgttttggctggcaggctgaggaagcggttgatattgcccgtaatcagattgctgatttagtgggtgcggatccgcgagaaattgtttttacttctggcgcaacggaatctgacaatcttgccattaaaggggcggctaatttttaccagaaaaagggcaaacacatcatcaccagcaaaaccgaacataaagcggtgctggatacttgccgtcaattggaacgtgaagggtttgaagttacctatttggcacctcaaagcaacgggttgattgatttaaacgatctggaagctgcggtgcgtgatgacaccattctgatttctatcatgcatgttaacaatgaaattggcgtggtacaggatattgctgctatcggtgaaatgtgccgtagtcgcggtatcgttttccatgttgatgctactcagagcgtaggcaagctgccaattgacttaaccaaattgaaagtcgatctgatgtctttctccgcccataaaatttacgggccgatggggattggcgcactgtacgttcgccgtaaaccccgcattcgtattgaagcacaacaacatggtggcggtcatgaacgtgggatgcgttctggtactttgcctgttcatcagattgtgggtatgggtgaagcttaccgtattgccaagcaggaaatggagagtgaatctcagcgtctgcgtggtctgcggttgcgtctgtggcaggggatcaaagatattgaagaggtcttccttaacggggatttagagcacggtgcgccgcatattctgaatgtcagcttcaactatgttgaaggtgaatcactgatgatgtcattaaaagatctggcggtttcttcgggttctgcatgtacttctgccagcttggagccttcctacgtattgcgtgcgttgggaatgaatgacgaactggctcacagctctatccgtttctctttagggcgctttacgacagaagaagagatcgactacgccattgaattgattcacaaatctattggccgcctgcgtgaactttctccgctgtgggaaatgtttagacaaggtgtggatctaaatagtatcgaatggtctcatcattaa

SEQ ID NO: 10520 - DNA, 387 bp, Photorhabdus luminescens
atggcttacagcgaaaaagtaattgatcactatgaaaatccacgtaacgtcggttctttcgatagtgaagatccaatggttggcagcggcatggttggtgcccctgcgtgtggtgatgtgatgaaactgcaaatcaaagtcaataatgaaggcattattgaagatgcgcgtttcaaaacttacggttgcggttctgcgattgcttccagctctttagttactgaatggatgaagggcaaatctctggagcaggcagaagcgattaaaaatactgaaattgccgatgaattagaattgccgccagtgaaaatccactgttctattctggctgaagatgcgattaaagcagcgattgcggattacaaaagtaaacgccagggcagataa

SEQ ID NO: 10521 - DNA, 324 bp, Photorhabdus luminescens
atgtcaatttcccttacagaaagtgccgcacaacgcgtttcgtcattcctgagtcaccgtggaaaaggtgttggtttgcgtctgggcgtcagaacatcaggctgctcaggtatggcctatctgcttgaatttgccgatatgattaacgaagatgacactgtatttgaagataagggtgtcaaagttatcgtagatggcaagagcatggtctatctcgatggtacggaattggattttgttaaagagggccttaacgaaggctttaaattcaacaacccaaatgtttccagcgaatgtggttgtggagagagttttaacgtttaa

SEQ ID NO: 10522 - DNA, 522 bp, Photorhabdus luminescens
atggactatttcactttatttgggctgccggctcgttatactgttgatcgagaacaactggcaagctgttatcaagaattgcagcgtcagtttcatccggatcgctttgcgagtcagccagagcgtgaaaaaacgctggcattgcagcaggcagtgactatcaatgacggttatcaaacgcttaaacatccactgaaacgcgctgaatatatgctctctctgcatggttttgatttagccaatgaacagcacaccatgaatgacaatgctttcctgatggaacagcttatgttgcgggaagaattggaatgtattgcggacaaagctaatccagaagtggcattggctgatttcgctgcgcgcctgaatgggatgattaaaacccgtagtcagctaatggtgcagcaattggatgaacagcagtgggaacaagcagccgatacggtgcgtaaattacgttttttggataaattgcaacagcaggttgagcaactagaagaacgtttactggacgacttttaa

SEQ ID NO: 10523 - DNA, 1851 bp, Photorhabdus luminescens
atggctttattacaaattagcgagccgggtttatccgctgcaccacatcaacgtcgtttagctgtcggtattgatttaggcacgacacattcattagttgccactgttcgcagtgggcaagcggaaacattgatggatagtgaagagcgttacctgcttccttcggttgttcgctaccatgaaaagggtcctgaaattggttggctggcccgtcaacaggctgcgtatgatcctgcgaataccatcagttcagtaaaacgtatgatgggacgctctctggctgacattcagcaacgttatccaaatcttccttatcaatttcaagcgagtgaaaacgggttaccgttaattaacaccgcaacgggtttggtcgatcccattcaggtttcctcggatattcttaaatcgctggtgcagcgtgcagaagaaacactggatggtaagcttgatggtgttgtgatcactgttccggcctactttgatgatgcacagcgtcagggaacaaaagatgcggcgcgtttagccgggttacatgttttgcgcttacttaatgaaccgactgcggctgcgattgcttatggactggattctggtcaggaaggtgtgatcgccgtttatgatttaggtggcggaacatttgacgtttctattctccggctaagccgcggtgtctttgaggtgttggcaacgggtggtgatacagcccttggcggtgatgatttcgatttaatactggctgactggatccgtgaacaagcggggattggcagtcgagatgaccatagtttgcaacgccagctactggatatggctactcaggtaaaaatcgccttgagtgatgctgatattgcagagataaacattgctggctggcaaggtaaaatcacccgttgcgaatttgaagccctgataaccccgttgataaaacggactttactggcaagtcgccgggcattgaaagatgcagaagtctctgcggatgaggttctacaggtggttatggtgggtggttcgacccgtgtgccgttggttcgtcatagggttggcgaattttttggccgcgaaccgctgacttccattgatccagataaagtggtggctgtgggtgcttcgattcaggcggatattctggtgggtaacaagccagatagcgacatgctgctgttggatgtgattccgctttcacttgggctggaaacgatggggggcttggttgaaaaaattatcccgcgtaacacgaccattccggttgccaaagcgcaggaattcaccaccttcaaagacggccagagtgcaatgagtattcatgtggtgcaaggggaaagagaattggtaagtgattgccgttcgctggcccgttttaccctacgtggtattccgccattaccggctggtggggcccatatccgggtcactttccaggtagatgctgatggcttgttgaatgtcagtgcgctggagaaatccactggtgtcgaagcttttattcaggtgaagccttcctatggcttatctgatgaagaaattgctcgtatgataaaagattctatggcaaatgctcaggaagatatcaatgcacgccaactggcagaacaaaaagttgaagcggcgcgggtactggaaagtgtcaccagcgcgttagaaaaagatgccgatctactgaatgaacaagaacaggcggcaattgatgctgccgtagaaacacttataacaagcgttcagggcaatgatcctgaaattattgaaaacgcgattaaacaactggataagcaaacgcaggaattcgctgcacgtcggatggattcatctattcgtcgagcgttggcgggccattctgtggacgagatttaa

SEQ ID NO: 10524 - DNA, 336 bp, Photorhabdus luminescens
atgccgaaaattgtatttttacctcataacgatctttgccctgatggtgcagttctggaagccaaagagggggaatccattctgaatgttgcattgcgtaatgggattgaaattgagcatgcttgtgaaaaatcctgtgcttgcacaacttgccattgcatcgttcgtgaaggtttcgattcactggaagagagttctgaactggaagatgacatgctggataaagcttgggggctggaaccagaaagtcgtctgagttgtcaggctaaagtttctgacgaagatttggtggtagaaattccaaaatacaccattaaccatgcccgtgagcactga

SEQ ID NO: 10525 - DNA, 201 bp, Photorhabdus luminescens
atgagcctgaaatggtctaacagccgtgaaatcggtgaagcgctatatgacaaatttccagaggtagatccaaaaaccgttcgctttactgatatgcatcagtggatttgcgagctggacgattttgatgatgtagctgagaaatccaatgaaaagattttagaatcgattctgctcgtttggttggatgagtttgaataa

SEQ ID NO: 10526 - DNA, 1296 bp, Photorhabdus luminescens
atgactaaacaaatcatgccaataacactgtcttatgaaccagcagcagcttgctggggtgaaaaagcgctgattagttccagtgagcaaggggtgatggttcacctggttggtaaaggtaaattaggggcagtgcaacgtgctggacgtaaaattgacgggcagggaattcgtcatgtggctctggtgggtgaaggttgggatttagagaaaagttgggctttctggcaaggcttccgtgcgccgaaaggtaatcgttctattgaatggcctcaattacctgcggctgaaaaacaggaattggaaagcagaattaaaattattgattgggtgcgtgacaccatcaacatgtcagcggaagagcttgggccggaacaattggcgaagcgtgcgattgacctgatgtgtggtatggcttgtgaatcagtaagttatcgcattattaaaggcgaagatttacgtgagcagggttatacgggtattcacaccgttggccgtggttcttcgcgtgatcctattttgttggcgttagattacaacccaactggcaacccgcaagcgccggtgtttgcctgtctggtaggtaaaggcgtcacatttgatactggcggctacagcctgaaacaatcttcctttatggattccatgaaatcggatatggggggagccgcaactctgacaggtgcattggcgctggcaatcagtcgtggcttgaaacagcgagttaaactgttcctctgcatagcggataacatggtcagtggtaacgcctttaaactgggtgatgttattcattaccgtaatggcaaatctgttgaagtgatgaatacggatgcggaaggtcgtctggtgctggctgatggtttaattgatgccagcaaagagaaagcgaaattaatcattgatgcggcaaccttgactggtgcagcgaaaacggctgtgggtaatgactaccactctgtactcagctttgatgacaaactggcggatgatctgttgacggcggctgcatccgagaatgaactgttctggcgtttaccattagctgaattccatcgtagccaactgccctcgaattttgctgatttgaacaacgttgctgcgtcaccgcatactgcgggtgccagtaccgcggcggctttcctgtctcactttgtggaagaataccaaaaaggttggattcacattgattgctcggcaacttatcgtaaatctgcggtagaacattggtccgctggggcaacgggttatggagttcgttcaattgctaatttattgttggcgaaggcgaaataa

SEQ ID NO: 10527 - DNA, 423 bp, Photorhabdus luminescens
atgggttcattaagtgaattaatttcggttgaaattgatgttccaagtggtagtaagctaacgcttagccaaccggaagaatatccttcaccgctcattgaagctttagtcagtttatttagccaacgtaaacctgttcgccgtgcttttatcattcaggttcatgataaaaatgtggatgaaaaccccaatttattaattggactggaaataaatggcaccgcagacgaaattgagcaactgatccatgaagcgggcactattgcttgtgaatacacatcggaagaagagccgattgacttctgtttagttgatgaaaaagagagtggcatcagccattatttgattcagcatactcagccattttaccagcgtaaattaggcagttggttacgtgaaagcattccggttatgaataagtga

SEQ ID NO: 10528 - DNA, 1797 bp, Photorhabdus luminescens
atgaaactatctaagatttattcaaacaagccatctctttttgagcccattgcttttcacgaagggcttaatgttatatatggtgaaattcggctcccagaaaacaaagaaaaagacacacataatctagggaaaagcacattgggtcgtgtgatagacttcgcactattatctaggcgaaatacagactttttcctatttaaacaccctgacatatttaatcagtttgtcttttttcttgagatcgaactaaaagattcaagtttcttgactatccgtagggatgttgcccaaccctcgaagatatgcttcaagaaacatcaagaaaaaaatcaagattactctcttttgcctacagatcaatgggatcatgaagatgtctcttttgataaagccaaagagctgctagatagtttacttgatcttagcgtgataaaaccctggagttatcgcaatagtcttggataccttattcgatctcaggatgattatagcgatgttttccaattgagaaagtttcgttccaaagatgcatcatggaagccctatctctctcatatactcggatttaatgcagagcttataaaagaacactataaaaaagaaaaagctctggaagagaaacagacaactgaaaaagcggtaaagaaagagttgggggggtcactcgaagacatcagtaaagttgaaggtattttgctattaaagaagaaagatgcggagaagaaacaggaacttcttgatgcgtttgattttcgacaacaagacaaagagaaaacaaaagtacttgttgaagagatagatgaagagatcgcaagtcttaatcaggaaagatattcgttaaatcagaatagaaagaaaatcctaaaatccttagaggaggataaagttttattcaatactgaagaagctgaaaagcttttcaatgaggcaggcgtgctttttagcggtcagataaaaaaggacttcgaacaactgttaggatttaataaagcgataactgaagaacgatttggatatctgaccgaagaaaagtcagaaattgaagccaaattgagaatcataaacactaggctaaacgaactaggaacacgtcgttcgaaaagtttgtcattcttaagtgacacagaggttttttccaaatataaaattctctcaagagaactcgtttccttacgtgcagatattgaaactctagagagacaaaaggcacatctacacaagttgcaagagcttagaactgaaattcgatcgctttccgaagagtgtagtcatttacaatccaaaattgagaataatgttgagtctcagaactccgatcaagctagcattttctctcaaattcggctctattttagtgaaattgttgatactgtcattagccgtaaagcattgctcagtgtatctccaaatcgagagggacacttgcaatttaaagcggaaattcttgatgaatcaggcaacgcaacgagtgcagatttaggacatacttatagaaagctgctatgtatcgcttttgatttagctgtactaagagttcataaaggtgagaaatttcctcattttgcctttcatgatggagtattcgagtctttggataatagaaagaaagagaatttattggctattttacgcgattacgttgaattaggtattcagtctgttatcacactaatagattcagatcttcctactagatctcctaaagagctgccagtgtttgacagtacagaaattgttcttcaactgcatgacgaaggagaatctggtcggcttttcaagttaaaaacctggtaa

SEQ ID NO: 10529 - DNA, 252 bp, Photorhabdus luminescens
atgctgcgaccaactaaacattcccatccagacagaacagtaatcaatgttgctttgattattatttcacgtcttaaaggattgagaattgagaattatagcgacctgctgagctatacaaagaaagcagtttccggtggtgatgtattgtttctcccagctctaaactttttatttattatgggtatcattgaatatcgtcctaaaactgatgccattgaatatgtagctaataacaatgaaactatctaa

SEQ ID NO: 10530 - DNA, 318 bp, Photorhabdus luminescens
atgagcaacgaatatgctgaaatattaagaaggagatatctgaaagagacagctcaaattaaagcttttctggctgcaccggaaaatgcagaaattatgcagctctatgaaaatgtagttgaagagtttcaacttaaaataattgcaaaaagaaaggaatatcaaaactttgatagcgtaatgaattaccttttcgatcttctttttggaagggatcctgttctaaaaaagcatagacgacttactaaaataatgcttttttacatgtattggaattgcgacatcggtagtgaagaagaatatgctgcgaccaactaa

SEQ ID NO: 10531 - DNA, 648 bp, Photorhabdus luminescens
atgaagtatgcttatgaagatttgggtgacgaccaatttgagcaactgatcgtttttttatgccaagaactacatgggattgccgtacaaggcttctcgaaaggccccgatggcggcagagatgccaagtttataggtaccagcgctctttatcccagcatatctgcaccttggagtggcaccatcattatccaagcaaaacatactaacgggtacaacaagctcttttcggagtctgatttctacaaccctgatggcaactcaagtgttttaagtaaagaaattgtcaggattaaaaagctacgaaatgcgaaacaattagatcactacatgttgttttctaacaggcggctggcaggtaatgcagaaagtgagataagatcctatttagcaaaaaagtgcgatatacccgaatcctctatttgcctttgtggtatagaattattggaaacatggcttaaatcttttccgaaggttgctgggagagctgctcttgatccggtggactcccctttaatcgtaagccccgacgctctttctgatgttgtatacgctttagcggctcagcaaaaaaaggtttatctacgaaagacgatccaccaacccccagaataccctatagtcagaaaaaccaaattaacaacatga

SEQ ID NO: 10532 - DNA, 210 bp, Photorhabdus luminescens
ttgggtaaatctgtaaaaaacaagagtgctattggacaccttaacccagaattgaatgagagcaggaaaactcaagatgttcgtttgttactggaaactgcaagacaagttgccaaggcgcatggtggattctcctttattgccaaagagactggtttatctagagaatctctctacaaagcactctcagcaacaggaatccgaccataa

SEQ ID NO: 10533 - DNA, 1014 bp, Photorhabdus luminescens; identical to SEQ ID NO: 7370

SEQ ID NO: 10534 - DNA, 1617 bp, Photorhabdus luminescens; identical to SEQ ID NO: 9151

SEQ ID NO: 10535 - DNA, 522 bp, Photorhabdus luminescens
atggagaaatatatgtctttaaagaggaaaatttcatatttggaagaagttagtggttcagcaaaggcaaatgaggtattgacctggctacaggcttatattccaggtaaagatcctaatattgtcgttgggcatgagcccagtaaagatgcggcgaaagagttaatccgaagtgattaccgttgggggcatcagagtaatgacaaatctgaaactttccaattaacgtataatttcctggagaatgaaccggataatatgccgtggattatttctggattttcagcatttaatgaagaacaagaagctgctgcaaagctgtcaattcaatcttgggctgatgtcgcgaatattaaattcaccgaaacctatgatgtcaaggaagcgaatatcacttttggtttctttgattttagtttaacaggtgattatgcgtttgccgagatgccgaatccaggtttgaaacaagtcggaacttggtatatacccaagaaacttcaagatgcagtttttagcacctga

SEQ ID NO: 10536 - DNA, 1026 bp, Photorhabdus luminescens; identical to SEQ ID NO: 6127

SEQ ID NO: 10537 - DNA, 1017 bp, Photorhabdus luminescens
tctccatttcggataaaatcaagcatcttcaatgattacgggtataacgcggaaagcggtactttcttaaaaaatgatattggagtgaatggctatggtcgccatacatttactcatgagatcggccatacattagggttggatcatccggctgattatgatgcgtctgataaggtagtaccgacttacaagaataaggcgacttattttgaagatagcggtgcttataccatcatgggttatttcagtgaaaaaaataccgggcaggactttaaaggtattgattcttctgcgccattacttaacgatatttctgctattcaggcgttgtatggtgcaaataatactactcgtaccgatgacacggtatatggttttaattccaacactgatcgcgatttctttacggcaaaagatgcaaagagcaaacttgtgttcactgcttgggatgcgggtggtaatgatacctttgatttctctggttttactcaggatcaacgcattaacttgaatgaagcttctttctcggatgtgggtggtttgaaaggaaacatctctatcgcccgtggtgtcacgattgaaaatgcgattggcggcagtggtaatgacattctgatcgggaatgatgccaataatactctgaagggtggtacaggtgatgacatcatttacggtggattgggagctgatcatctttggggtggggaaggcaaagatacctttgtctacttgaatgccgaagaatcatcgtttcttgagcgtgattggattcatgactttgtttccggtgaagacaagattgatttgtcattgttcgatctgggtgcagcaggaaaaggcactattaagtttgtcgaggaattcactggtgctattggggaagctgtgatcagctatgacagcgttaacaaggtaaatgatttcgttattaatatgggaggagaattatctcaagatggttttggggtgaagatcgttggagaaccgctgatagaggccgatttcatcctttcataa

SEQ ID NO: 10538 - DNA, 147 bp, Photorhabdus luminescens
atggaatatcttttgccggttcacttggtgaatcgtttattccgttatcaggaaaataattgtcgaagaattgctaattatgaggctattaaccgggctattacctccagcgtccaagagaatgtgctgtctgaggattttaattga

SEQ ID NO: 10539 - DNA, 15651 bp, Photorhabdus luminescens
atgaaagatagcatggctaaaaaggaaattatctttgatgctggattagtgcaagtactgtcaaacaaggtcggtgacgacatatctgttcagaaacttaatttgttgtcagaggctgaacgtacactgctattggaaacttggaatgccactgaaaccgtctatcctgaccagttaggtatccatcagttgtttgaacgacaagtggagaaaaccccgactgcgacggcgttaatcgcaggggataagaccctgagttatgcggaattgaatgcttgtgctaaccgactgactcatcaactgattaagcaggggattggcccgaatgatcatgtggcaatcctgttagagcgatctatcgaattggtggtagctcaattggctattctcaaggcgggggcggtttatgtccctatcgataccagcgtgccggacgagagaaaaaagtggttgataaacgatggcttcgccaaattgttgctcaccggcgcacaagcgaatatcccggctaatctggatatcccgctaattcgtctctctgatgagacagacgcggacaaggcggaagagagttttaatcctgacttactttattccggtactgcgccagcgtatatcatgtacacctccggctcgactggcacccccaaaggggtgatcgtgcctcaccgcgctgtggtccgactggttattaataatggttatgttgaaattgaacccaatgatcgggttgctttcgcggctaacccggctttcgatgccagtacttttgaagtgtgggcccctttactcaatggtggggcattggtggttatcgaccacaccactttgttgacgccgccggaatttgtacaggaattagaccgttatcaaattaatatcttatggttaagcgtcggcctgtttaaccggctggcggcggagttgtctccagttttgccgcagttgaaaaacctgattgtcggcggcgatattcttgatccctatgtgatttcccaggttttacgcaacaacccacctcagcagttattgaatgcctatggaccgaccgagggtaccacctttaccaccacatatcggattgaaaccttgcccacgggagtgaccaacattcctattggtcgaccaattgccaacacgcgggtttacttactggatgagcagggccagcccgtgccgttggggaggatgggcgagatctatgttggtggcgacggggtggcctgtggttatctcaatcgccctgaattgactgctgaacgctttttggttgatccatttagtgatgtgccggatgcgcggatgtaccggaccggcgatttagctcgctacctgccggatggcaatctggaatttttgggccgcaacgatcagcaggtgaaaatccgcgggttccggattgaaccgggagaaattgaagcccgattggtggagtattcgacagtacgtgaagcggtggtgttggcgttaggtgaggggcaggacaagcagttagttgcttatgtgctggcagagtcggataacgaattgcctacccacttgcgtgagcacctaagtgcgcgattgcctgattatatggtgccggtggcctttgtacggttggatgaattcccgctaacacctaatggcaaactggatcgtcgggcgttaccggcaccgggtgaaaacgcctttgcccgtcaggtttacgccgcaccgcaaggggagcgggaaattgcattggctactatctggcgtgagttattgggtattgagcagataagtcggtatgacagcttctttgccctaggcggtcattcactgctcggcgtacgcatgattgaacagctacgccatttagggctgacgttatctgcccgcgacctgtttcaatcaccaatactggcggagttggcccaaacattggggcagcatcagattgtgacagtgccgccgaatgtcattaccccggcgaccaccgcgctgacaccggagatgttaccgctgattgatttgactcagcctgagattgatcacatcgtcgagcaggtgccgggtgggggggctaatattcaggatatctatgcactgtcaccgttgcaggacggtatcttgtttcaccacctgctggcgaaagaaggtgatccttacttgctggcctatccaatgatctttgctgaccgtggtttgctagaccgctatttatttgcggtacaacaggtggttgaccgtcatgatattttgcgtaccgcttttatctggcaaggattatctgttccggcgcaggtggtttggcgtcaggccccattgtcagtcactgaactgacgctgaactcggctgacgggcccgtcggtgatcaactggcgcaacgttttgatccgcggcaataccgtctcgatctcagtcaggcaccgttgttacgctttgtgatagcacaggaagaggatggccgctggtatgtattgcaattacaacatcacctgattggcgaccataccacgctggaagtcatgaacctcgaagttcgggcctatcttgacgaacaggatgataacctgccgacaccggtacctttccgcaatctggtggctcaggctcggcagggggttgaccagacagaacatcaccgattctttaccgacatgttggcagaagtggatgaaccgacattaccgtttgggctgaccgaggtacatcgtgatggttctcaggtcacacaggcgcaccggatgttgtctcctctgctgaatgatcgtctacgtgctcaggcgagacgcatgggtgtcagtctggcaaccctgtgccatctggcttgggcacaggtgctgtcgcgtaccagcggacaagagaaagtggtgtttggtaccgtgctatttgggcgtatggccgccggggaaggggccgacagtggcatggggctgtttatcaataccttaccgttgcggctggatatcgatgatacctcggtacacaatagcgtcaggatggcgcatacccgattagctggattgttggattatgagcatgcttcattggcgctggctcaacgttgcagtggggtacagggcggcacgccgctttttagtgctctgttgaattaccggcataatgagcaaccgatgatcccgcatgaggtaatgccgggtattgaatttctcggtgaacaggagcggaccaactacccgtttgtgctgtcggtggaggatggtggcgataccctggggctgactgctcaggtagtacaaccatttgattcagaacgagtatgtggttacatgcaacaggcgctggaaagtctggcggatacccttgaacaggccccggaaacgccggtacgggcgctaaatgttttgcctgcatcggaacgcacgttgttgctggaaacgtggaacgcgacagaaaccccctatcctgaacaacgctgtattcatcagttgattgaacaacaagcggagaaaacgccagaggccgaggcgttggtgtatgaaaatcaaacgcttagctatggacaactgaatatcagcgctaaccggcttgctcatcaactgattgccttgggtgttgtgccagagcaacgggtggcgatttgtatggcaagttcaccggcgcgggtgatagcggtgctagcggtgctgaaagcaggcggaacttatgtaccgctggatccggcttatccgggagaacgattgtcacatatcctgaccgatgccgtcccggctgagggggtgaagacaatcgggttgaaggcaatgggggtgaaggcaatagtgttggcggatagtactgggcaggctgcattgggtgagcaaatgcttgcggggctgacggtactagacccgaatatcttacctgatcagccggataacaatccgcaggtttctgccttaacttctcgccacctagcctacgtgatttacacttctggatcgaccgggatacccaaaggggtgatgattgagcatcgtgggctagtcaatctgatccgggataaaattatccaattcgacattcgccctgttagtcggatgttacagtttgcttcatttggctttgatgccggtgtctgggaaatcatgatggcattaggcagtggagcctgtttggttattccggccgaaaccgttcgtcaagatccgagtcgcctctggcattacctggaagaacaatcggtgacgcacgcttgcttgacccctgctttgttgcgagaaggggccgatttgccaacgataacaataaaaccgacattaatattgggcggtgaagcccctagccccgtgctactacgggcgctaagtcatcaagcaatcctatttaatgcctatggcccgacagaaattaccgtctgtgccaccagttggcgttgtccatcacactatactgatgtgttggttcccattgggcgtccgacagcgaatacccgtatttacctactggataaccacggccagccagtcccattgggcgcagtgggggaactctatattggtggggatggtgtcgcccgtggctatctcaatcggccagatctgaccgatgaacgctttctggctgatccatttagtgatgctgccgatgccaggatgtaccggaccggggatttggtgcgctacttaccggacggcaatctggtgtttgttggccgtaacgaccagcagattaaaatccgtggtttccgcattgagccgggagaaattgaagctcggttggcagagcacccggtggtgcgtgaagcgcgggtcgtggccttgggagatgggcaggataaacgtttagttgcctatgttgtagccgaagcggatagtggactggcggccagtttgcacactcatttgagcgcgatgttgcctgattatatggtgccagcggcctttgtgcgtttggcgaccttcccgctgacgccaaacggtaaattggatcatcaggcattaccggcaccgggagaggatgcttttgctcgccaaatttatgtcgcgccacagggagacatggaaatcgcagtagcggctatctggtgtgaattactgggcattgagcaaatcggccgacacgataatttttttgccttgggcggacattccctgttggccgtgcggatgatgaaccggatagccgctttcagtgttgacctgccgttggccgcgttgtttgtgtctccgtcattggcgacatttaccgagaaaatctgcgcacagatctgtgcacaacgtaatacgggcagtgataaattgcctgaaattaggtccatatcccgtgatagtgtcttgccgttatcatttggtcaacagcgtctgtggtttctggcgcaatttgagggagttagtgatacctaccatattccgacagccttgcgtttacgtggacggctaaacttttctgcctggcagcaggctctgaatcgcctgtttgctcgccacgaggcgcttcgttctgtttttatcacagttgatggtcagcctcaggttgaactgttaccggcggaatttggtctaccggtgaaaaaatacgatttgcgtaaagcatctaacgtggacaaacaatttaagcgtttgtgtgtacaggaagccaaaacgccgtttgatcttgctcgtggccccctaattcgttgcgcattgatccaactggccgatgaagagcatatattcttactgactcagcatcatattatctctgatgcttggtctttaaagatacttgaatcagaactggttgcactttacgcggcgggtctaaatcaacagccagatccgttgttgccattgaccattcaatatcctgattatgcggcttggcagcggcaggtattttcaggtgaaggagtacaggcacagagtgattattggcgtcggacgttggcagatgcaccggtgttacttgaattgccgatagacagacctcgaccctctcagcaatcatttaccggcggccgggtagcggtgcacattgatgccccgttggtacaggccctaaaacatctggggcaacagcacggtgccacactgtttatgacgctgttaaccgcttgggctgcattgctatcgcgcttgtctgggcaggatgatgtggtcattggtataccaagcgctaaccgcaatctgcgggaaattgaaccactgcttggcttctttgttaacacattggcgttgcgtatcgatttatccgacatgccggatgtggccacactactgcggcgtgtacggcagacgacactgggagcgcaggagcatcaagatctgccgttcgagcaggtagtggaaattgttcaaccgccgcgtagaccggagcatacaccactgttccaggtaatgtttgcctggcaagagagtgaaacagaggaatggcaattaccggaattggcggtaacgccatttgagctaggatacgatatagcgaaatttgatctgcaactggaattaacggagaaggcgggcgaaattgttggagagctgaactactcttctgccctgttcgaccatgaaaccattgaaagacaggtgggttatttgcaggctatattgtgggcaatagtgaaccagcctcaacaacctgtcacggctatcgatattttgtcatcctctgagcgggagttattactggaaaattggaatgcgaccgaagaaccgtatcctactcaggtatgtgtccatcagttgtttgaacaacagatagagaagactccggacgccatagcggtaatctatgaaaaccagacgctcagctatgcagaactgaatgcccgtgccaatcggctagcccatcagcttatcgctttaggcgtagcgccagatcagcgggtggcgatttgtgtgacgcgctcacttgcgagaatcatcgggttattggcggtgctgaaagcgggcggggcctatgtgccgttagatccagcctaccccggtgaacgtctggcttatatgctcactgatgcgacaccggttattttgatggcggataatgtcgggcgggcagcattaagtgaagacattctggcgacgctgacggtgctcgatccgaataccttgctggagcagccagaccataatccgcaagtctctggactgaccccacagcatctggcctatgtgatttacacttccggctcaaccggtagaccaaaaggtgtgatgattgaacatcgtagtgtggttaatttgacgctgacacaaattacccagtttgatgtttgcgccaccagccgaatgttgcagtttgcctcatttgggttcgatgccagtgtctgggaaatcatgatggcgctgagttgtggggctatgctggttattcctacagaaaccgtgcggcaagatccacagcgcctttggcgttacctggaagagcaggcgataacccatgcctgtttgacaccggctatgtttcatgacggcaccgatttaccggcgatagcgataaaaccaaccttaatatttgcaggagaagcgccgagtcccgcgctatttcaggcactgtgcagccgggccgatttgtttaacgcgtatgggccgacggaaatcaccgtgtgtgcaaccacttgggattgcccggccgattataccggaggagtcatccccatcggcagcccggtcgccaacaaacgtctctatctgctggatgaacaccgccagccagttccattgggcacagtgggagaattgtatattggtggcgttggggtagcgcgtggctatctcaatcgtcctgaattgacggctgaacgtttcctgaatgatccatttagcgatgaaacgaatgcccgaatgtaccgggcaggagatttggctcgctatttgccggacggcaatctggtgtttgtcggccgtaatgaccaacaggttaaaatccgtggtttccgcattgagccgggagaaattgaagcacgactggttgaacactctgaggtaagtgaagcgctggtattggcgttgggtgacggtcaggataaacgtctggtggcttatgtggtggcgctagcggatgacggactggcgaccaaattgcgtgagcacctgagtgatattttgcctgactatatgataccggcggcttttgtgcgtttggatgcctttccgctgacccctaacggtaagctggatcgccggtcgctgccagcaccgggggaggatgcctttgctcgccaagcttaccaagcgccacaaggggaaattgagatagcattagccactatttggcgcgaattgctgaatgttgaacaggttggccgacatgacagtttctttgccttgggcggtcactcgctgttggcagtcaggatgatcgaacgtttacggcgtataggattgggcctgtcggtgcaaacgctattccagcatccgacattaagtgtattggcccaatctttggtgccgcatcgtgaaattagcgtgcctgataacggtattaccgcggataccactgtgctgacgccagcaatgttgccgctgattgatctgactcaagctgaaattgatcgtattgttgagcaagtaccgggtggaattgccaatattcaggatatctatgcgttgtcaccgttacaggatggcattttattccaccatctattggcaaatgagggtgatccctatctactgattactcaacaggcttttgctgatcgacctttacttaaccgctatctggctgcggttcaacaagtggttgaccgccatgatatcttgcgtaccgcctttatctgggaagggttgtctgtgccggctcaggtaatttgccgtcaagcacctttgtcagtgacggaattgacgctcaatccggctgatggagcgatcagtaatcaattggctcaacgttttgacccgcgtcggcatcgtattgacctgaatcaggcaccgttattacgtttcgttgtggcacaagagagcgatggtcgttggattttgctgcaattgttgcatcacttgattggcgaccataccacgttggaggtgatgaacagcgaagtacaggcttgcctcttggggcaaatggatagcctgcctgcgccggtcccgttccgccatttagtggcacaggctcggcagggtgtcagtcaggcagaacatactcgcttctttactgacatgttggctgaggtggatgaaccgacgctgctatttgggttggcggaagcacatcatgacggttcacaggtgacggaatctcaccggatgctgacagcgggactgaacgagcgcttacgtggtcaggcgcggcggttgggcgtcagtgtagcggcgctatgtcatctggcttgggcacaggtgttatcgcgtaccagtgggcaaacgcaagtggtgttcggtacggtgctgtttggacgtatgcaggcgggtgaaggatctgatagtggcatggggctgtttattaacaccttgccgttgcgattggatatcgataataccccggtgcgggacagtgtacgtgcagcccatagccgactggcgggattgttggaacatgagcacgcttcactggcgctggcgcaacgttgcagtggcgtagagagtggtacaccattatttaatgcgctgttgaactaccgacataatacccagccggtcacaccagatgaaatcgtgagcggcatcgaattccttggcgcacaggagcggaccaactatccatttgtgttatcggtagaggatagtggctctgatctagggctgacggctcaagtggtgcaaccattcgatccagaacggatatgtggctatatgcaacaggcgttggcaagtttggtgcaggcgcttgagcaggcgtccgatatgccggtacagcagttagacattctgccggcaactgaacgcacattgttgttaaaaacttggaacgccactgaaacagcctatcctgagcggttgtgcattcatcaactgtttgaacagcaggtggaaaagaccccggatgccacggcgctgatacatgaaaaccaatcccttagttatgtggaattgaatgctgatgctaaccgattggctcaccaacttattgcgctgggtgtagcgccggatcagcgggtggcgatttgtgtagcaagttcaccggcgcggatagtggcgctgttggcggtgttaaaagcgggaggcgcttacgtgccgttagacccggcctatccgggtgagcgtctggcccatattttgactgatgctgaaccgattattttattggccgatagtgttggtcgttcagccttaggtgagcaaatgcttgtggggcagacagtgattgatccgcattcattgcctgatcaaccggataacaacccacaactatctacattgacctcccgtcatctggcgtatgtgatttacacctctggttcgaccggcacgccaaaaggggtgatggtggaacatcgtgggttagtcaaccttattcaggataaaatcgcccgatttgacatttgccccgctagtcggatgttgcagtttgcttcatttggttttgatgcgggtgtctgggaaatgatgatggcgctatgcggtggtggtgctctggtcattcctgatgaatctgtccgtcaggatccacagcgcctttggcattatctgcaagagcagtcagtgacgcacgcctgtttgaccccggctttgctgcgggatggggctgatttgccggtgataacggtaaaacctaccttgatattaggcggtgaagcgcccagtgtggcgttgcttaaagcgttgcgcaccaaggccacggtattcaatgcttatggtccaacggaaatcaccgtttgtgcaaccagttggcgttgcccgccaaactataccgatgtgttatataccgatgtgttagttcccatcgggcacccaacagccaacacctgtctctatctgctagatgccctcggtcagcccgtgccgctaggggcagtgggtgaactctatattggtggcgtcggtgtggcgcgtggctatctcaatcgtcctgaactgactgacgaacgtttcctggcagacccatttagtcatattgctgacgcccggatgtatcgaactggggatttagttcgctatctgccggatggcaatctggtgtttgttggtcgtaacgatcagcagattaaaatccgtggtttccgcattgaaccgggagaaatcgaagcccggctgacagaatactccggggtgcgtgaagcgcgggtactggccttgggcgacggacaggataaacggctggtggcttatgtggcggcggaagcggatgacgggttggttaaccgtctgcgtgaacatctgagtggattgttacctgattacatggtaccggcggcctttgtgcggctggatgcttttccgttgacgcctaacggcaagctggatcgccgggcattacccgcaccgggggaggatgcttttgcccgccagatttatgctgcaccgcaaggagaaaccgaaaccgcactggctgctatctggcgtgaattactcggcgttgagcagatcagccggtacgacagcttctttgccttggggggccattcgttgcttgcggtacggatggttgaacgtttgcgtcatttgggtttaacgctggcagtacgtgatctgttccaatccccgatattgtctgaactggcgcaaacattaaggctgaatcagaccgaaaaagtgccggccaatgtgattacaccggccaccacggtgttaacgccagaaatgttaccgctgattgatctcactcagcttgagattgatcgcatcgtcgaacaggtaccgggtgggatagccaatattcaggatatctatgccttatcgccgttgcaggatgggattctgttccaccatttactggcagacgaaggtgatccttacctgctagcgggtcaaatggcctttgctgatcggcctttgctggatcgttatctggcggcggttcagcaggtaattaaccgtcatgacatcctgcggaccgcctttatctggcaaggattgtctgtaccggctcaggtcgtttgtcgtcaggcaccgttgtcggtgacggaattgacattagatgtggctgacgggccgatcagcgaccaattagcacaacgttttaacccacgtcaatatcgcctcgatttgggtcaagcgccgttgctgcgttttgtggtggcacaggaaagtgatagccgttggattgtgttgcaactgatgcaccatttaattggtgaccataccgcgctagacgtgatgagtaatgaagttcagacataccttgacggacagggcggcaacctgccagcgccggcacccttccgcaatctggtagcgcagtcccggttagggatgagtcaggctgaacatacccgtttctttactgaaatgttggctgaggttgatgaaccgacgttaccgtttgggctggcggaagttcgccatgatggctcgcagatgactgaatcgcaccggatgttgacccctgagttaaatagcagtttacgtggtcaggcgcggcgattgggagtgagcctggctgccctatgtcatctggcttgggcacaggtgttatcgcgtaccagcggacagcagcaagtggtatttggtaccgtgttgtttggacgcatggcggcgggtgaaggggctgaaaatggcatggggctgtttatcaataccttgccgctacggttggatgtggatgataccccggtacgagaaagcgtacaggtagcgcatcaccggttggcgggattgttggaacacgaatatgcctcgttggcactggctcaacgttgtagcggggtgcagggaggaacgccgctgtttagtaccttgctgaactaccgacacaatatagcttcggtggaatcgaatgaaatcatgagtggtgttgaatttctcggtgcacaggagcggactaactatccgtttacgctgtcagtagaagattttggtgatgcactggggctgacagcgcaaatcgcccagccgtttgatgccgagcgggtgtgtggttatatgcaacaggcgctggaaagtctggtgggcgcactggaacacgccccggaaaccccggttcagcggttggaaattttaccggcagtagaaaggaaactgttactgaaagtcggcaatggcccgcaaacggcctatcccggctcgttgtgtattcatcatctgtttgaacagcaagtggcgaaaaattctgaggctacggcactggtctatgaagaacaggctctcagctatgcagaattgaatgcatgtgctaaccgactggctcatcagttaattgaactcggagtggagcccgatcaacgggtggcgatttgtgtcacgcgttcaccgtcaagagtagtggcgctactggcggtactcaaagcgggtggggcttatgttcccttagatccagcctacccgggtgaccggttagcttatatgctcacggatgcggcaccgtcagtggtactggcagataatgtgggtcgtactgctctaggtgaacaggcgcttaccgcgttaacggtacttgatccgaatgttctgcctgatcaaccggataacaatccgtacatcccggcgctgacctcacgacatctggcgtatgtgatttacacttctggttccaccggtacaccaaaaggggtgatggtcgaacatcatggcttggtcaatttaatttgggagaaaatcacccaatttgacattcactcggatagccggatgttgcaatttgcttcatttggtttcgatgccagtgtctgggaaatcatgatggcactgtgtgggggagctaccctagacattccggttgatagcgttcgtcaagacccgctgcgtctgtggcgttatctggaagaacggcgggtaacacacgcctgtttgaccccggctctattacgggatggggccgatttaccggcgataacgataaagcccaccttgatactgggcggagaagcacccagtgcggcgttgttgcaagcattacgtggtcgggcaacgctgtttaatgcttatggcccgacagaaatcaccgtctgtgcaacctgctggcgttgcccgccagactatactgatatgctgatccctatcgggcgtccgacagcgaatacctctatttatctcttggataatcagggccagccagtgccatttggagccgtgggggaactgtacattggtggtactggtgtcgcgcgtggctatctcaaccgctctgatttgacgactgaacgttttctgacggatctgttcagcgatcaaccggatgctcgtatgtaccgaaccggggatttagcccgctacctgccagatggcaatctgctgttcgttgggcgtaatgatcaacagattaaaatccggggtttccgcattgagccgggtgaaatcgaagcgcggttgatggagtattctgatgtgcgtgaggcgattgtattggcactgggagatggtcaggataaacggctggtggcttatgtcgcggtgctagaggataacgagctggcaagccaattacatcgtcatttgagagccttgttgcctgactatatggtaccgtcagcctttgtgcgtctggacgcctttccgttgacgccaaacggcaaattggatcaccgggcattgccggtgcctgatcagaacgcctttgctcgtcagatctatgaagcgccacaaggagaaacagagatcgccttggcggctgtctggcgtgaattactgggggttgagcgaattggccggcatgacaacttctttaccttgggtggacattcgctgctcgctatgcggatgatcaatctggccgcagaacgagggttgatttgctcattgaataatctgttccaattcccggtgctagcggaactggtggcagagatcacctcagattcgctgtctcaatcgcaaagcagcgccataccggtgcgaccggatggaaccgaaccgccgctcttcttcgtgccgagtggcatggatgactattcctatgtttttgggctggctcagcatattcaggcggattacccgatttatgcgctaccttggccgtctatcaatgaggagcagacgtcgaccattgaagctctggcgaccagaatgatcacctttgtgaaggccgtgcaatcagaaggcccgtatcggatatacggctactcttctggcggtatactggcttatgccattgctcagcaactgctgcatgccggagagacagttaatttcttggggctaattgatacaccggctccgcactgtttcaagacacgagttgatcaacctaaacttcagttccttgctgaattggcaaggcaatcagtggatgaacatcctcaagagattgccgcattgcatcagaaaatggatgaacttaatttagtgcaatttattgccgcagcgcaggagctggaattatacccatcaaatctgcgtcctgacttaattgccaaacgttggctacagatgggaaattatgtccagatggtcaaggattatcagccgaaagcactggcgataacactgcatcaattctatgcaatggaatcttatccacagatcccgtttgttaccgatgttgcgctacagtccgtcacaatggaaccgtcgttaggttgggaacagatagttcctgactcttcgctacagttaacctcggtgccgggggatcattttagtctgatggaagatagtgaaaataaaactattttagctaagaccttaagcatggcgctggcaatgaattgtgaagcggaggcgctgtaa

SEQ ID NO: 10540 - DNA, 498 bp, Photorhabdus luminescens
atgacccatagttttcaaaacgagatccctaaatcgcgtattaatatcaagttagatttacatacaggaggtgcgcagaaaaaagttgagctgccgctgaaattattggtcatgggggattatagcaacgggcaggaacatctccctcttggggaaagaaaaaaagtggctatcaataaaaacaattttgatagcgtactggctgaattcagtcccgcgattaacttgacggtcaaaaataccttggccggagatggcagcgaggagaatatcgcccttatttttcggcaaataaaagacttcgagcctgaacaaattgctcgtcaaatcccgcaactgcgggccctgctttctatgcgccatctattgcgcgatctgagatctaacctgctcgataacaccacctttcgccgggaactggaacatatcctccaggatcaagcgttaagcgatgagttacgggctgaactggccgcactggcaccaaaaacgatttga

SEQ ID NO: 10541 - DNA, 1527 bp, Photorhabdus luminescens
atgactgaacaacaaaccgctgcggcggcgataacgactcacgccgaaggcagtgtttatcaatcgttatttaagaaaatcaatttacagccggtggagcagttaagcgatattgatcgctttcagagcagtgatgcgctggctgatgtgacggtagacgagcgggtcacggcggctgtcagcgtttttctctctgtgctgaaaacctcggcgcaaagggttaaacggctggataaggcattattggataaccatatccgcgagttggacgagcaaatcagccgtcaattggatgtggtcatgcatcaccctgagtttcagcaggtggaatctgcctggcgcggcctgaaattcttggttgatcgtactgattttcgtcagaacgtcaggattgaagtgttggacgtcaccaaagaggatttgcggcaagattttgacgatgcgccggaaattgttcagagcggtttctatcaccacacttacattcaagaatacgatacaccgggcggtgaacctatcggatcggtgattgccaattatgaatttgatgccggcacgcaggatattgcgctgttgcgtaatatcgccaaagtttcggcggcggcgcatatgccattcattgccgctgctggtccggctttttttggcaaacaaacgatggatgaagtggccgcgattaaagatatcggtaactactttgaccgcgccgaatacatcaagtggcaagcgttccgcgacagcgacgatgcacgctatatcggcttgactttaccccgcgtgctagggcgtttgccctatggcccggacaccgtaccggtgcggacttttaactatgttgaagaggtcaccggtccggatcacgataaatatttatgggccaacgccgcctttgcttttggtgcaaacatgatcaagagctttgtcagtaatggctggtgtgtccagatccgcggtccaaaagcggggggagcggtgactgatttgccgatccacctctacgatttggggaccggtaatcaggtcaaaattccatcagaagtgatgattccagaaacccgcgaatttgaatttgcgaatctgggcttcattccgctctcttactacaaaaaccgggattatgcctgcttcttttccgctaactcggcgcaaaaaccggcattgtatgacaccgatgaagcgacggctaacagccgtatcaatgcgcgtctgccctatattttcctgctgtcacgtatttcccattatttgaaactgattcaacgggagaacatcggcaccacgaaagatcgacgtctgcttgaaatcgaactgaacaactggatcaacaccttggtaactgagatgaccgatccttccgatgatttgcaggcatctcatccgctgcgtgaagcgcacgtcattgtcgaagatattgacgacaaccccggtttcttccgggtcaagttgtatgcggtgccgcattttcaggtagaggggcttgacgtcaatctgtcgctggtttctcaaatgccgaaatccaaaggttaa

SEQ ID NO: 10542 - DNA, 1350 bp, Photorhabdus luminescens
atgaaaattgagcgcccgctatgggtaacaggaaccatcttgtctccccaacagtttcagcagcaggctcgttgggaggcatatgccaatgagtcgattgctcgtctgggactggcgcatccttggggcgtgctgaccgcggtgtttgatcaacacaccttagcgttggggcagttgaaagcggatcacctgtgtgtgcgttttgccgatggatcgctgattgacaccgatcaggccgatcgcctaccgccggtgctggaattggccgccgttttgccgacagatgcgcagcaggtcacggtcttactggcattgccgtacacttacgccaatggcggtaactgtcttaaacccgatgaacgcgccgatcgtccggtgcgttaccagcaggagtgggtaccggtacaggatgaattcagtgatcgcagtgaatcgatggcggttgctcgttatgcgatatcgctgcgttttgacagcatggaaaacggtcaatatctcacctgcccggtggcgcgtctgttgcgcgatgctcaaggaaaatggatttttgatgagcaatttgtgccgccattactgcgtcttagcgcacatgccggttcgatagctcggctcgatcagttgttgacgcagttacgcgctaaacaggctcgattgatggcaatgcgccgagagagcaatgagcggatggcggattttgcggtggcggatgtgtcgttgttctggctgcttaatgcgcttaacagttatgaaccgatattgagtgattttaaggcccatccagatgtgcatccagaactgttctaccgtgaagcggtaaggctggcgggcagtctgttgaccttttcactggaccataacgccagcgtgatcccgcgttatcagcacgataatttgacggcggtattcccgccgttatttgacttgctgagacaattgctggagatcagcttgccgtcgcggatggtgacgattgagttgaagaaaccatcggaacagcagtggatagccactctccacgatgcccgtttatgtgaagcggcggatttttatctctctgtccgctcttccataccggcacaccagttgtacacccggttcccgctgttatgtaaagccggtgcgccggatgaggttgatcggatgattagccggtcattaaccggcatccccttagtcgcacttagccatgtcccggccgcgatcccgttgcggctggagaaccagtactttgcccttgatctcacccatccggcgggcaaagccatgctggcggcagggagctgtgctttctacgtgcccggagtactgggcgatattcagcttgaactgtttgcggtattgaggacatga

SEQ ID NO: 10543 - DNA, 393 bp, Photorhabdus luminescens
atgaataaatcacctttatcaactaaaaaatcgccaccggatatcgatgccttgttacagaacagctacctgttggtggcagagctctgtcagggcgcatcggtggaacaggcggaggtggtgtggcagcactgcacccgcgagatagaacagacacggcaagcgctgagtgatgcggatgttagcgaatccgcgataaatcatatcagctacgcccagtgcgccctgctggatgaaaccgtgctggagcgagcgccggaacagggatatgcagcctggcgggcaacatcattacaggagcatttctttgataccgccgaggccggtaaccagttgtatgaacggatgcgtactgtactgaatgaaccggccgccgatcgggcagtactgtaa

SEQ ID NO: 10544 - DNA, 1506 bp, Photorhabdus luminescens; identical to SEQ ID NO: 7801

SEQ ID NO: 10545 - DNA, 336 bp, Photorhabdus luminescens; identical to SEQ ID NO: 7802

SEQ ID NO: 10546 - DNA, 366 bp, Photorhabdus luminescens; identical to SEQ ID NO: 7803

SEQ ID NO: 10547 - DNA, 1779 bp, Photorhabdus luminescens
ctggtgggggttaggtcactatctggcaacgctatttccggggttggcgagatgagtgtcatgttgcgacgggtgttatggggatggggggccgggctggcgctgctgctctgtctggtctggttgcccttatcgccggtgggccggtgggtgggggcagtcattatcctgctctgtacgctgatggggctgttttatcgcgggcgttctcaacggcgagagcgccttaacagcctgtcagcggtactgccgcctgaaagtaatcgcctgccggtggtgttggtatatagcgacattcaggacagcttgtttggtaatgaactgttgcgtcagacgccacaaggctattggttgtgcttaccgacagggacttctctgtctgacgcgatagttagcttgctggccgcccggccctcttggggcggtcagttaagtgtgatggcggtgataaacccgcagcaataccgtgacgccgccgtactggctggttgggtgcgagaactacgctggcagttatctcaagcgcgtcaacgacatgctatcccgctgcctttactgctagcgggttacgtagccgggccgtcccgacaacctgacgattcaccgtggtttgagtggcaatcaggacgaaccacggtaacggcttggcgcgaaggtgcctcttttcaaccactcgcggattggttggaacagggcacgctggcagaacagatggcacgttttcagtgtggggttgagttgactggctgggctgattggatgaaggcgcatgtattgcccgtctgcctgaccccggaagatggcttatctccttgtccgccgctggcgatggtattgaagtttgtaccggcattaccgcattgggtaaccggccatgtctggcaacagtggttacaaaccaaaacggcgctgaacagggcgggcgatccgatagccacatcggctaccgctacattgccattcccggacagtgtagtgcggctgctgcccaccagtgcgctacaaacagcgctacagcgggccgtggggatagctctggggctgtttctgctggcgggcataacagcgctaggttgctcggcctggcataaccgacagttattgcgtcaggtggagagtgacctgctgcattaccggtctattgccgcgacggatgagagccgcaaggcacaggcggtggcggtactgagggatgatgccgatcggcttgagaagtatcaccgggatggcgtgccgtggcgtctgggattggggctatatcaaggagcacgattacctccgccattgcatgcggccattgccggttaccacgctaaaccgagggagaaaacgccggtaacgccgggggaaccacagaccatcagccttaacagtctggcgctgtttgatgtgggacaggcgaaactgaaagcgggttcgaccaaagtattagtcaacgcactaatcaacatccgtgccaaaccgggctggatgatcctcatcgccggacatactgattccaccggtgatgccacgaaaaatcaggtgctgtcactggcacgcgccgaagcagtacgcgattggatgttacaaaccagcgacatatcgccggcttgcttcactgtacaaggcaagggagcaacgagtccaattgcgactaacacaaccgctgcggggcgagctgccaatcgcagggttgaaatccgtctgataccgcatgtggccgcctgtgcgcgaccgcagaaagtaccggacaccttatcaacaacgtcgccgctaccggcgacatcacttaagtaa

SEQ ID NO: 10548 - DNA, 492 bp, Photorhabdus luminescens
atggcgattcccgcttatttatggctgaaagatgacggcggtgctgacatcaagggctctgtcgaggtacggggccgggaaggtagtattgaaattgtggcgttggaacatatgttgcacatcccgacggacaacaataccggcaaactgacggggacccgtgtgcatgccccattggtattcaccaaagaggtggatgcatcaagtccctatttgtataaagcggtcaccaccggccagaccctgaaatctgctgaaatcaaatggtacaacattgacgacgcaggtcaggagaaagagtacttcatcacccaactggacaacgtgaaggtggtgaaagtggcaccgctgatgcatgacatcaaagaccctaccaaagagaagcacaaccatctggaacgcattgagttgcgttacgaaaaaatcacctggacctacaaagacggcaacatcattcatgctgatgcgtggaatgagcgcacgacggcgtaa

SEQ ID NO: 10549 - DNA, 2529 bp, Photorhabdus luminescens
atgacgaacctaacaccgatgatcatctttgatcacagccgttacagactaaaagtgtggcgcaataaagcaccgctggatgtgctggcctttaccggacaggaagccttaagccagccgtttcgctatgccattgaattcaccagtgcggagaaagggattgaaccggcacagatgctgatgcagcaagcctcatttaccctgacctcgcctgcgatcaatccggggatacggtggatgccggttgtgccgccggagccgctgcgctcggtttacggggtgatcagcggctttaaactgctctccacttcgcgggacgaaagccgttacgaagtgacgctggagccccggctggcgctgctggcgagaagccatcaatacgctatttaccaaaaactgtccgtgccggagattgtggagaaaatcctgcgggagcgacatggttttcgcgggcaggacttcctgttcagtctggcgtacagctacccgaggcgggaacaggtgatgcagtatggcgaagatgacctgcgctttatccaacgcctgctggcggaagtgggtatctggtacaaagtgacggcggatgaccggttaaagatcgatgtggtggagttttacgacgaccagcgtgactaccagttcaatgtctacctgcctgcccgcaatccgtcaggtatgcacggcgaggaggacgcggtggtgtggggcatggagaccgcgtatcaggtggtggaggggaaaattacgactcggaattatgactaccacgatgcccggccgtatcccggcttgaacaccgaggaggatgtgacacggggcgatcgaacgacttatggcgaagcgtaccattaccgtgacgactaccgaatacccggtgatcgttacgcctatcaaccggagacggaaagcggggtgttttatgcccgtttgcatcacgaacgttacctgaatcaacgtattcgcctgcggggaatgaccacttccgctacgctggtgccggggcaggagttgaaagtgaaaggtgacgccccggaaacgtttcgcaaaggggcgatcatcacccacatcaccaacagtgcccgccgggacagcagttttgagatgacattcacggccattccctattccgagaccgtgtgctttcgcccggagcgggtgccgaaaccggtgatggccggcacgatacccgcgcgggtgagcagtaccaaagtgaatgatacctacggcgatatcgacaaagacggcttatatcgggtggcgtttaactttgaccgggagaaatggccgcaaggcggcgaaagcttgtgggtgcgtctggcgcgcccgtatgcgggagagaactatggctttcactggccgttgctggaaggcactgaagtggcgatcgcctttgaagggggcgacccggaccggccctatatcgcccacgcgttgcacgactcagtgcacccggatcacgtcaatctctacaactacaaacgcaacgttctgcgcactccggcgaataacaaactgcggatggatgacgaacgcggtcgggaacatatcaaactgagtaccgagtacggcggtaaaagccagttgaacctcggtcatctcgttgatagccagcgcccacacccagataaacggggagaaggctttgagctgcgaaccgacgactggggagcaatccgggccggtaaggggttgtttatcagtgcggataaacaggcccgggcgggcggcgaggtgctggcgatggaggcggcgctgaatcaacttcaacaagcgcagaccttaaccgaggcattatgcggcgcggctgaaatggctaaagcggaactggcggatttgcagcaacagaaggcgttgttaagtgaaacattagccgagctgaaaaaatccgcgttgttactctccgcgccagaagggatcgcgcagacgacggcaaaaagcctccagttggcggccggggaaaatattatcgccaccagtgggaaaagtaccgatttcagcgtattgaaaaaattcacggtagcggcaggtgaaaggatcagcctgtttgcccaaaaactgggcatcaaactgtttgccagcaaaggccgggtagagattgaagcgcagggtgatgagatggggctggcggcactgaaagatatcacggtgaatagccatgagggcaaagtgatcatcagtgctaaacaggagattttgttggttagtggcggtggttatatccgaatagggaatggtcaggtggagtgtggtgcgcccaatcacatcatccaacgggcggcagtgtggcagaagtttggcgggcagagtgttagtcagatggtttcccaacgtgaaacagtggatttttccgtcacaccgcaggtgctctggccttttgatgatatgccggtgaaggatcaacatgcctttttgcacaatcatgacgatagtcagcactcttcgataacgggtgcagacggtaagacggctaaacagaagaaattgggtgtggaagcaataaagttttatttaaaagaaggtaaggagtga

SEQ ID NO: 10550 - DNA, 1611 bp, Photorhabdus luminescens
atgactgattcatcagaaaaagtggttgtttatcctgtttatgatgagcatggcaggttgtattacccgctagtgagtgcgcccagccataaggacctgacggcgatttgctataaggtgcctaaccgggtgatcccagtgatttttctgcccggcgtgatggggagtaatttgcaagatcaatatggaacgtcagtctggcgtttagacggcatatcgagcaccttggaatggtttattagaggagcagaaacacgaaaaaaattgcttgatccggaaaatactgtggtcgattcgcgtggaaaggtagatgacaatcataaagaaggccccaaatttccttctcgtcaagagcgaggttgggggcaggcatcttatatgagttatggagaatttttaccctggctccaggctgcgttggatgatcaggatgagttattgtttaaccggttgaataagacaggagaactgaccctgcgccagaaactggagtttatggatctacaggcggaaacgggggaagaaaagcttttatcgaaagagattaaactgagttatcaatatcagtttccggttcatgtcatgggttataactggctccagtctaatgcggattccgcaaatcaactggctgagcatcttattgatattattacacactataaacagcgtggtcagccctgtgaaaaagtgattctggtgacacactcaatggggggactagtggcgcgtcactattcagagaaattggagggaagtaagaaaatattaggtattgtacacggtgtcatgccgacctatggcgcgccgacggcttataaacggatgaaagcgggtgaaggggggggagtcggactggttatcggcagtaatggcgccaagatgacgccagtgatggcgcaatcaccgggaccacttcaactattacctagtttgagatatggcactgggtggttgcagattaaagatggtaagacactttataccttacccaaacgcgatccttatgaagaaatctacttgcaacgtgataagtggtgggggttatgtgaagatcgtctaattaatccgaccaatgagaaaagaaatccggtagtaatgcaggcagattggaaaaaatatactcatatactgtctcgtgtagtccaaccttttatcgaagagttaactggttgttaccacggcaatacctatgccttttatggtaacagtaccgaacacctctcttacggcgtcgtgaggtggactcgtagaagttatgttgaccggggagatgatcctaatctggcatttaatagaccggtatatgatccttttaataatcacctttccgatacacgcatggtgggatattccctcgacccaaacaaacccgatgaccatagccatttaagagcttttattcttgaaaagccgcagcaacccggtgatggaacagtaccggtgcagggtggaaagtttaccgctggagggctgcgttcaatattgggagcggaggttgatcatgagcatgcctataatactgataaaacccgtttttttactctgcgggcaattatcaaaatagcgcaattagttaaacaaacttccttggcttatcccgatgaatag

SEQ ID NO: 10551 - DNA, 1092 bp, Photorhabdus luminescens
atgaatagaaaaagagtattaatcattattgcaattgtcagcttgttggtggtggtgttttacgggttatggcaacagttacagccttatccccctcatactatgttaaatcagaaggaaaaattagccgtggataaattattaacaaacttacaaacccgttgtattggccgatatttggttgatttgccagcggactacaataacactgtaaatatggctagggtaaatgatagttgggtagagactcaacggctctatttacctgcttttgaacagcgtattcagttacgggaagaagcattacggcaaacaaaaacagtgaatccggttaatatgccctatttgaaaaatatctaccgcttacctgagggaatgcaagggattatttttgaacgtgtgcaagatcagagtgtatcggatgcagcccgagtattggaagctcatttgtacaataatggtgtggcgattaaagtagaaatgaaagtttcaaatgcttctgctgcacgttatgacaaagggaggcaaacttttcctgatatttatgataatgatgtgccagagaaattggttgagctgaaaaatttattatcccgtatacaaggacgtaaggagacggaaatacccactaccgctgggagttgtattcccaatgcgtttattatcgataatcacagggataaggaagatattggttcattatataaaacgaacccggataattatttgaatgtgaggatacagacggataactttatccgggaaaaagacagcatgctggaacgcctcggtgtaattaaagcgagtctgtatcgaggcagcattttccgtaaaggagtgaggaaaattaataagttggataccgaagagttgctgttggtggggcagcagccgaatagtgatgatcctcgttatcagtttacattactgacaaatgaaaaaactggcggaaaggaaacaccggtgtttgatttaacggtggttaatgatgaagaaacaccaacagcctatactcagaatgaaatcgtggcattttgggatgcgattagtcagaccgtcagggttagacccggtgcttttaaacggcaataa

SEQ ID NO: 10552 - DNA, 1107 bp, Photorhabdus luminescens
ttgaataggaaaacgaccttactgactttagcggttatttataccttgtggtggcatatgcctgtattttattacccgattttaactgaaaaggaaaagaaaatgacaactgaaatgttatcaaatatgcagacccgctgtgtgggccgttatttgatagatcttcctgctggatttgacaatgttgccgatcgagggatatttattggtgatgcgcaaatagaaaccgagcgtttatatccacctgcatttgaacagcggatacagttaagagaacagaagttaaaggaagctaaaactattgatcctaaagatatgccctttttgagaaaagtttatcgccttcaagataatttgaaaggtgtgattttcgaaaaaaacgaagatattgacattccgagctatgcgagggtattagaagctcacttatataacaatggggttgcttttactataacaatgaaatttatggatttgtctgatgaaaaatatgctcgtgatagagccggttttatcaaagatggtttttctgaagataaattaaaggctacagatagaacgatgatgaaaatgaggaacttattatccagaatcagcggccgaaaagatacagaaatacctacagaggcaggtacttgtattcctgatggttttattactggcagtcgtgatgagaaagaaaatatgacctttatctatgagcgaaatgaaagtgatcattttacttttagtattgagatattgaatgatcttcaagagaaagaccatatgttagatcgtattgtcagtatggaaggtgtattactggctatgcatactaagctaataaggaaaggaaaacgggaaattcatggcacttatacggaggaaattttagcaaaagtgccgacaaaagtcatcgatcaaccggaaattgaaatcccgggatatgcatttaatttgattgcaaatgaaacagccggtgattataagaatccttttgttaatatcgaattagtgaatgatcggtcatccgcaacgccgtacagtgaaaatgaactgataacgttttgggatgcggtaacgagtacttttcgtaaaaggcccggcgcttttaaacggcaataa

SEQ ID NO: 10553 - DNA, 234 bp, Photorhabdus luminescens
gtggggttcgatgtgattagttttggtttttggggcttggcattatacgcctatgttttcttattattctacacctggccgataattgtgatgcttgatgtatctgccatttgtcgaataaagaaatgcattaaagataagaaatactggcgtgcgtcattcttgatttttgccgctgtattaatgagtggctcccttatcttcttcatggtatggataggtttatatggttaa

SEQ ID NO: 10554 - DNA, 1119 bp, Photorhabdus luminescens
atgagttggcctattcctgaaataccggaacttaaagtcgtggcacctttgcgttatcggttatggtttatcattttacttttgatattgattgtcggcacattggtttacgctgtgctaaaagataccactgatttctattacgcggcgatttatagcagtttcccgtcctttctggtgtggctgctgttatttggtgcggtattaaatcgctatgagcaatattgtgcggcagcatacgcttgggaagaagccagtgccgaaacccgtttccaatggcagcaatggagcagaaaacaactggcggtgattggtaatattattctgacgcctgagcaacaaggtattgcgccactgttaggtgatgcggaagagatccctgcttttcctgaacaaggacgggcattatctctgccatcgagcgataggcggcaattattggctaaaatggatcaggattttgaacaacagtgtccgggttatcgttctcttttacgccagatttatattgcttccgacgatcacgcttcttatgaatctgcgatatatcaacagtggaaaataagcatcttaccgataataaaccgagatgagatcgataaattatacgatgaggatgatttcgaagggctgataatggttattgcgttccagtgctggccttctgaaaataataagaaagcgtacagtgaatttgtctcggctcaattattttcgtcgacaaaatttgccacgcaggaaaaacttactgtccttgccggtatgggaagaacattaccttcattacccggagaaataatcaaagatttacagatattgtttgaatataaccgtattgataaaaataacatgcggcacctttggataacgggtgtcacgaatgatgttctgactgaactggcaattaacagtcatgattctgcgtttaatcttttcaccgaaaattcggttcatttaatcgatcatacttttggtcctccggggccgctatcgatatttttggcatcagccatgttaactgaggcaattagcctgaccggtagcgatcatatcgttatcaatcaattaccagaggggagcgctagcctctatttaatgactaaggaattacatcaatga

SEQ ID NO: 10555 - DNA, 3372 bp, Photorhabdus luminescens
atgaaagttaatcgtcaccaccaatatggctattttggatatatttttattacccttagccttgtcgggatatttctcatgttgatctacttgaataaaacattacttgaggaacgggggctgcttaaatccgcattgtatgcctacgccacagtttttccgctcttattaataggcttatttagcaatgctgtctggtggcatattcggcagaataaagcgcagaaaaaactcagacctgaaaccgagcggacagcggatcgctccagtcagtctgctttggtactgagtgacttgggcgatcgcatgcgcctccgttacgggcggttctggtggtataaagtccgcattttactggtggtgggcgaagtggagcaggtggaagccatcgcgccggggctgaccacgacgcactggctggagggttatcgcacgctattgctctggggcggcagtttgcaagcggaaccgaataccgctcaattgatggccctgcgtcgcttgcgccgttaccgcccgctcaatgccattgtctgggcgctgaccgaaaaccaaagtgcgcagccggtatggatggataaggccctgaggatgttgcaaaaacaggcccaccagttgcgctggcaggctccggtctacctgtggcaggtgtgtcacagtacctggtctcaggaaggtcgtatcactcagaccgtcggctgcttttttcctgaacgctgtaccccggatatcgtggcgacacagttacaaacgttggttgacccgttgcgcgagcgcgggatgcagcaactgttggagaagacggcccacgattttctctgtcgtctgtccgcgaacttgaaacaacaggggattgcgcactggcaacaggtcctgacgccgtggttagcggagtatggtgatgtggtgtcgctgcggggtttgatgttcagtttgccgcttaaagcgcagacgactcgcctcccgcagatctggctgcccgacacggcatggcagggggtgttggagggcagtcgttgtttccacggtcggcgggtgggcatgctccacacacagaccgtttgtcgtggcctgatagtgctgggcttgttatggggtgccggaatggtgctctcctttttcaccaaccgtgaccagctagccgtggtgcaggcggcggtaactgacctgaaagtccagccggagaattctgatgcccagttgatggccttgaaggatctgcgtaacgaggtggaccggctgcaagaccgggctgaacacggcgtgccgtggtatgagcgctttggtttgagtcagaatcagaaactgttgacggcggtgctgcccgattatgcgcaggttaataaccgcctgatacgggacaaagccgctgcggtgttgcatgcgaaactgagtgcgctggtgaatttaccgccgggcagccctttgcgggctaagtgggcgcaagccggtcatgaccagttgaaagcctacctgatgatggcgcagccggaaaaagtggatgctgtgtttttaacccggatactggatgaaaatgaacccgagcgggccggtattgcccccgctgtctggctggatatggcgtgggatttgtggagtttttatgcggagaatctggccgcgcatcccgaatggcggataaccccggataaggcgttgattaaacaggtgcgtcagttgttgctgctccagctaggtaagcacaatgccgaagcggcgctttaccagcagatgctgcaatcagtggagaaaaattattcggacctgacgttaaggcagatgaccggcgacaccgatgcggcgcggctgtttaccacctctcacgtgataccggggatgtttacccgtcaggcgtgggaaggcgggatacaaaaggcgatagcggaggcggtggcgtcacgtaaagaggcaattgactgggtgctgagtgataaccgtcaggcagtctcggcttcggtatcgcccgaagagctgaaagcccgtttgaccgcccgttactttaccgattttgccggggtgtggcaggattttctcaacagcctgcgctggaacaaaacccgtaacctgtcggatgtcatcgatcagttaaccctgatggcggatggacggcagtctccgctgattgcgttgatgaacacactggcctatcagggcgagaccgggcaacaggggccgagtttatcggactcgttggtgaaatccgctaaaacgttattgaataaaaaaacgccgcgaatgattaatcaacagacggctggcttgcacgggccgatggatgaaacctttgggccgttgctggcgctgatgggagaaaatcaggcagaaggaagaatcaaggcggacagtaccctgaatttacaaaccttcctgacgcgggtaaccgatgtgcgtctgaaactgcaacagatgaacaacagcgacgacccaccggcaatggcgaatgcgctggctaaaacggtatttgaagggaaaagcactgatttgaccgatactcagggttatgggcgcttgatagccgccagtctgggcggccaatggcggagttttggtcagacgctgtttgtcgagccattagcgcaggcgtggcagggagtattgaaaccggcgacggcgaatctgaatagccagtggcagacggcgatagtggacaactgggatcgggcatttgcgggccgttatccgtttgccggtggcgacagtgaaatttcattgccgatgttggggcaatttatccggtcagattcagggcggatagagcagtttttgacgcgtcagttaggcgggatactgcataaagcgggtaaccagtgggtagtggatgaggtgaatggtcagggcgtacagattaacccggattttctaaaggcgataaatcagctcagtcagttatcggacctgttgtttgcggatggcagtcagggattgcggtttgaactgcgggccagagcggtgcgggatgtggtggaaactgacctgacgatagatgggcagaaactgcgttattttaaccagatggaaagttggcagagctttcgctggccgggagagacctataaaccgggtgtgatgctgacgtggaccagtgtcaatgccggggcgagattgtttggtgattatcaggggaactgggggctgatccgctggctggcacaggcgaaagcggagaggctggatgaaagccgttaccgactaatatttaccgcgccggatggattaccgttaacctggattttgcgcacagaattgggcgaagggccgctggcgttattaaaactgcgcggatttaaattgccgaaaaatatctttgtagtgacgccgggtaatcacacgacaatatcagcggtaaatgacgatgatctgataacggaatag

SEQ ID NO: 10556 - DNA, 2400 bp, Photorhabdus luminescens
atgacgaacctaacaccgatgatcatctttgatcacagccgttacagactaaaagtgtggcgtaataaagcaccgctggatgtgctggcctttaccggacaggaagccttaagccagccgtttcgctatgccattgaattcaccagtgcggagaaagggattgaaccggcacagatgctgatgcagcaagcctcatttaccctgacctcgcctgcgatcaatccggggatacggtggatgccgattgtgccgccggagccgctgcgttcggtttacggggtgatcagcggctttaaactgctctccacttcgcgggacgaaagccgttacgaagtgacgctggagccccggctggcgctgctggcgagaagccatcaatacgctatttaccaaaaactgtccgtgccggagattgtggagaaaatcctgcgggagcgacatggttttcgcgggcaggacttcctgttcagtctggcgtacagctacccgaggcgggaacaggtgatgcagtatggcgaagatgacctgcgctttatccaacgcctgctggcggaagtgggtatctggtacaaagtgacggcggatgaccggttaaagatcgatgtggtggagttttacgacgaccagcgtgactaccagttcaatgtctacctgcctgcccgcaatccgtcaggtatgcacggcgaggaggacgcggtggtgtggggcatggagaccgcgtatcaggtggtggagggaaaaattgcgactcggaattatgactaccacgatgcccggccgtatcccggcttgaacaccgaggcggatgtgacacggggcgatcgaacgacttatggcgaagcgtaccattaccgtgacgactaccgaatacccggtgatcgttacgcctatcaaccggaggcggaaagtggggtgttttatgcccgtttgcatcacgaacgttacctgaatcaacgcattcgcctgcggggaatgaccacttccgctacgctggtgccggggcaggaattgaaagtgaaaggtgacgccccggaaacgtttcgcaaaggggcgatcatcacccacatcaccaacagtgcccgccgggacagcagttttgagatgacattcactgccattccctattccgagaccgtgtgctttcgcccggagcgggtgccgaaaccggtgatggccggcacgatacccgcgcgggtgagcagtaccaaagtgaatgatacctacggcgatatcgacaaagacggcttatatcgggtggcgtttaattttgaccgggagaaatggccgcaaggcggcgaaagcttgtgggtgcgtctggcgcgcccgtatgcgggagagaactatggctttcactggccgttgctggaaggcactgaagtggcgatcgcctttgaagggggcgacccggaccggccctatattgcccatgctctgcacgactcagtgcacccggatcacgtcaatctctacaactacaaacgcaacgttctgcgcaccccggcgaataacaaactgcggatggatgacgagcgcggtcgggaacatatcaaactgagtaccgaatacggcggtaaaagccagttgaacctcggtcatctcgttgatagccagcgcccacacccggataaacggggtgaaggctttgagctgcgaaccgacgactggggcgcgatccgggccggtaaggggttgtttatcagtgcggataaacaggcccgggcgggcggtgaagtgctggagatggccccggcaatcagtctggtaaaaggtgcggtgaatcaggtgctggagtggggaacagtgaccaaaactcacctgaatcatcagccggatactgaaagcctgaaaacctacttacagcatgtggatcaactgaaaatggcggccatgctgctcagtgcgccggaaggggtggggattgtcagcccgcagactgtgatggtgcaaagtggtcaggcgctctatgcccaaagtgcgggggatgtgcatattgccagtgcaaaccggattgggatgaattcgatacaggctatctccctgttagcacaaaacgaagggatgcgtctggtgtcagggaaagggccgctcgccattgaatcacatggcgatagtttaggtctcacctcattaaacgatgtcaccgtcaattcaacacagggtcacgtccagattacggcgaaaaatggcctgacattggcgtgtggaggcgcgtacatccgtctttctccggcaggagaaattgaaattcacgggccgggcctgttaagcctgaaagggcagcacaaaatggcgtcaccggcgaaacaggactttcctttgcctgacctgcctgaatcggtgtgtaaaacgtgtttggaaaaagcgcaggaattgtcgcaggggtttgttttgaggagttaa

SEQ ID NO: 10557 - DNA, 783 bp, Photorhabdus luminescens
atgaatgaccatcaaatagctgactggattgcatcacttgcatcgtctgtaacggaaaccggcataagttgtatcgatatgattgtggatcaatcagggggtaagttccccctaattccggcattaaaaagtttttcatctgagatggattggtgctcgctatttcagggattgccggaggagattgtgacagataaagccccgatcttaattcggattgatctaacacaacctgttcaacggcaatggatgaatgaaatcatgatgcgcttaggcggcaagcctatgttgctgattttatgttcttcatggtcgtttgatcgcttgtcccaatatttgattcagtgcgtggatgcagcctacgccgagaaaggcgggatcttacgtttttatgatccgcgtatttttcctgtgttgttttcccatgtattggacaaggaacagcaacaacaatttttcaggcccgcgctgttctggagttggcttgatcgtgatggggctccacatgttatctggcgtgaaggccatgcagggccggttgatgaaacctttcagaaaattgatctcacagatgagcagctagaacatctcttgtgcgtttctgatgctcacatactgatgttgaaactgagtagtcaggttgaatattcagaattttcccgcgaacaactgttcaacaattgttatgccttgatgatagagacatctggtgaagacattttactggatgacgacagagagtcgttcgtacttaaacaccttaaagccagattatcgtcatag

SEQ ID NO: 10558 - DNA, 516 bp, Photorhabdus luminescens
atgaaaaaacaacaattgaggctggcggttttattcctgctgctggtcgcctgtagccaatttccggcacaggcaggcatcattatcgccattaatcgtactaaatgggcgattaaccggttcactgtggatgatcaaccgggtatcgacagtatcggcccgtatcagggcggtggtggcggttgctgctatcgggctccagataagtggcgaccggggatgacggttaaggtggattgggagaccggtgtcgctttttccgacgactttcccggttatgaaaatgatgagaagtatttggcgtggagggacaagattaacgcccagaaacgccagcatagccaagtagtgccggttccttattatcagaatggtggtgatacctgcggtattacggtgcacttcctaccctgtgatcaaattaaagttacgacctcgtgttatgcctacggtagcccgaactacccgattaaagaacccttggaaatgaaggaaccaaaagtatgtccgaagtaa

SEQ ID NO: 10559 - DNA, 513 bp, Photorhabdus luminescens
atgaaaaaacaacaattgaggctggcggttttatgcctgctactggtcgcctgtagccagttttcggcacaggcgggaatcattgaagcgattaatcataccaaatgggcaattaatcggttcagtgtggatggtgaaccgggtatcgatattatcgggccatatcagggcggtggtggtggttgctgctaccgggccccggagaagtggcgaccggggatgacggttaaggtggattgggagacaggtgaagcatccacaaaaggctttccgggttttgctgatgaagagaagtatttatcttggcgtaataagttgcgggctaatgatcgtcagcatagcaaggtagtgcctgtacccgattataccgggcagcgtacctgcggtattacagtgcacttcttaccctgtgatcaggtcaaaattaccacttcctgtaacacctacggtagcccgaactacccaattaaagaacccttggaaatgaaggaaccaaaagtatgtccgaagtaa

SEQ ID NO: 10560 - DNA, 513 bp, Photorhabdus luminescens
atgaaaaaacaacaattgaggctggcagttttatctctgctgctggtcgcctgtagccaatttccggcacaggcaggcatcattatcgccattaaccatactaagtgggcgattaaccggttcactgtggatgatcaaccgggtatcgatattatcggcccgtatcagggcggtggtggcggttgctgctatcgggctccagataagtggcggccggggatgacggttaaggtggattgggagactggtgttggggacatgggggggtttcccggttttgcagatagaaaaaaatatttggcgtggagggacaagattaatgcccaaaagcgccagcatagccaggtagtaccgttgcccgattataccgggcagcgcacctgcggtattacagtgcatttcttaccttgtgatcaggtcaaagttaccacctcgtgtaacacctacggtagtccgaactacccaatcaaagaaccgttggaaatgaaggaaccaaaaatatgtccgaaataa

SEQ ID NO: 10561 - DNA, 2490 bp, Photorhabdus luminescens
atgtccgaaataaagcatcatgatcttgtctggttgccagccccttttccgtctcaggggcggttacctgccaaaaattatttggtggtggaaaactgtcagcaacagagcagtcaggaaaaagcttactatcaggaactttgtctggccgccaatcgtcgggtaatccgtccctgttgtaacacgttgcatgtcagcctgttttttgatggcaccggcaataatttatataacgacctttatcaggctgttcctaaccatccgaccaatgttgtccgtcttttccaggcaaccattggggcgggttatgccggaggggcatcaggtaagccgttactggataatattgagagcaccggaagaaagtactttaagtattatattcccggggtgggaacccctttcccggaaattaatgagctggattacagcaaattggggctggcggttgctagcgggggagaagaccggatcaattgggcattactgcggttgattgatgtattaaagcgcgtattggtaaacgacacaattgatgatgttgcttgtcaaaaatccctgaaagcgatggcaaccacatggaatatgctggagttgggaggcagcaataaccgctatgaggagttttataagcagtttgcgagcttaaaacgtgaactgaggatagcccgcagtcagccgggacgaggtaagtgtaagttgttgggcatgaaattgtatgtgtatggtttttcccgtggggctgcggaagcgcggacttttgttaactggttgactgaactgtttccgccgtcgagagaagcaggccagaaaccggctcagtgtctgcaacataaacacgagacagacccggatagcaagttacccatcagcgtagaatttctcggattgtttgacacagtggcatcggtcggggtgccccatatgatccccgttgttgaaggtcatatggcctgggcagacggcacgcaggaattgccatcggaggcgacttacggtggtctggtgaaacgttgtgtgcacttggtctcgacccatgaacagcggttgtgttttccgatggattccattcgccgttccgatggcacttacccgacaggcagcaccgaggtgatttatcccggtgtgcactctgatttggggggcggttatccaccgggagaacagggtaaggcaataggaaaacgtgacaatctattactctcacagatctcattacatgaaatgtattcggcagcgtttgagattggagctccattgaaagttcctaaagatattttgccacaagagttatctcaatatagctggcgttctatgccaccagatgtcggtgatgaatttgatattgacacacaattagtcaaccgcttcaacgcctggcgtcaggtcactctggggttggagatgccccaacaacctctgtcggatgaagaagcggcccgctttgaaccggtgcgggcctctgtggcattggaacaggcgatgaaaaaccagatggactggctgacagcctggcgtatcaatcgttacgccaacggcacgctgcttggtgagccattttttcatgaggctcctaatcgtgatgcgaaaaaggcgcattatgaacagagtgaacaggcacaaaaagcggcacaacagcaggtcgaggctaaacggaaagtgcagtggaatgaattttttcgcgatggaggaaaaacgcagccgttgttaatgcagggagtgccggattttgacccggaaaccgctcaaaaccagttgcgagaagcggccgcggaatttcgcaatgactactacggtgaccggcgggaacaacacagtaagtggcaatttcttttcgatactgtgccacgtcaggcaatttacatgttggatgatcatgatgacctcctggagtatctgcaaatgaaagcagggggagaggcattggtcaaacagctttttcggcctgttccggcggcaaaacccggtcaacaggaaccacccgagtcattgctggtcgccttgtatgacaatcaggttcacgattcccgtgcctggtttatgtactcgacactcggttcacgtgaaccgtggggaggctatttccgctaccgagtcatttacttcggtacaatttgcagcagaccgctgtcacttctgtcagtggctggcactgtggcggggttcatgtcgccggccgcagagagtgtactgcttttgtttaaacagaataaagtcgcaaacacgatgggggatgccatcgacaaagtgtccaagggcaccgctgctgagtgggaagtgaccgcgcagtatttaacttccggcaagctgatcaccctgttagcaggaccggagtatagaaaagcgttcacccataatgtgggcgagatgaccagccagcagagaaagtttatcgaagagcagcggttgcaaacggccaaagataatctcaaagcgcattgggcgggaaaaacgcaggaaccgaccccgttcaaggagcctgagaaatga

SEQ ID NO: 10562 - DNA, 1152 bp, Photorhabdus luminescens
atgaaagcgatccctctttttccgccttattgtcaggcttcgcctccccgttttaaacgttggttgggagtcggcaccggattggttttgttgatcagtaacatcgtcgcgctgataagacctgaaatcggtgacactttctccttatatgccctgatccctggattggcggcgttatggctgttatgtctgttatttcgcgtgctgttttaccgctttgctgtgcataacgcctggacttaccagcagcaggtcgagcgggttcagcaacagtggtggcgtaaacaccgtcaacagattgcgttggtggattatgtattagctgggccgctagggtgcacgcccgatgtatggaataaagtggttaatcagcctcattgccacgtggaacctatcgaggaagagagtggtcagtcggtgcgtctgctgcgttcttttgccgctgatattgaacagcgggaaatacaactggcgggcatgtcggtggaacagtggcataaacaaaggaaggcgcagtcgccgttgcgttgtacgccattacgttgttattggttaggctctgtcgctgcctggcaagagtttaccgcccagatggcggagcggtttcctgatgtggagttgcctgaacagccacagccttggtgtggtatcgatacgctggatgaaataattgatttgctcaacacgacaaaggaccaacacgcgactattttgtgtgcaggttgtcagtgcgtagacagcgaggctgagtcagccttacccgccggtgaagcagcatttatctggttattgaaaaaacagggcaacgtctgtttaacccgtggtgaatttttttgttctcaaagtgatgaagaggttgttgacgtcgcggccagaacatgggttcaagcggatatgtctcagccaccggcaacctgctttctgttttctcagccggatatatcctcactggagaaactcggctggaatatcactcaacatcaacaggatctcaattggggcaatattggcgggatggaggcgatcgtagtgcaaacactggcggcgatctcggcggaaaataccggccaaccctgtgggtggttagcccgtgatcctcaacatactttagcgtttggaatagtaaaatcttatggcactgcaagagaataa

SEQ ID NO: 10563 - DNA, 3351 bp, Photorhabdus luminescens
gtggtgaagacacttatcttactgataggcaccattaccctgctggtttcgttggctggtctgggatggtgggtttggggagaacaccgaaccactgatgccgaaactttcaaccatctgttgtgggtttgtggaatagcttgggtgctcactgtggtggtgagtatgctaggttttatcacggtaacgttgtttgtcaaaaacaaagtcaccgatgtgaagtccgatacccggccacttttgccagccagcgaaccgtatgattatggtgatttgggcgatcgcatgcgcctccgttacgggcggttctggtggtataaagtccgcattttactggtggtgggcgaagtggaacaggtggaagccatcgcgccggggctgaccacgacgcactggcaggagggttatcgcacgctgttgctctggggcggcagtttgcaagcggaaccgaataccgctcaattgatggccctgcgtcgcttgcgccgttaccgcccgctcaatgccattgtctgggcgctgaccgaaaaccaaagtgcgcagccggtgtggatggataaagctttgcggatgttacaaaaacaggcccaccagttgcgctggcaggccccggtctacctgtggcaggtgtgtcacagtacctggtctcaggaaggtcgtatcactcagaccgtcggctgcttttttcctgaacgctgtaccccggatatcgtggcgacacagttacaaacgttggttgacccgttgcgcgagcgcgggatgcagcaactgttggagaagacggcccacgattttctttgtcgtctgtccgcgaacttgaaacaacaggggattgcgcactggcaacaggtcctgacgccgtggttagcggagtatggtgatgtggtgtcgctgcggggtttgatgttcagtttgccgcttaaagcgcagacgactcgcctcccgcagatctggctgcccgacacggcatggcagggggtgttggagggcagtcgttgtttccacggtcggcgggtgggcatgctccacacacagaccgtttgtcgtggcctgatagtgctgggcttgttatggggggccggaatgatgctctcctttttcaccaaccgtgaccagctagctgtggtgcaggcggcggtcactgacctgaaagctcagccggagaattctgatgcccagttgatggccttaaaggcgctgcgtaacgaggtggaccggctgcaagaccgggctgaacacggtgtaccgtggtatgagcgctttggtttgagtcagaatcagaaactgttgacggcagtggtgcccgattatgcgcaggttaataaccgcctgatacgagacaaagccgctgcggtgttgcatgcgaaactgagtgcgctggtgaatttaccgccgggcagccctttgcgggctaagcgggcgaaagccggtcatgaccagttgaaagcctacctgatgatggcgcagccggaaaaagtggatgctgcgtttttaacccggatactggatgaaaatgaacccgagcgggccggtattgcccccgctgtctggttggatacggcgtgggatttgtggagtttttatgcggagaatctggccgcgcatcccgaatggcggataaccccggataaggcgttgattaaacaggtgcgtcagttgttgctgatccagccaggtaagcacaatgccgaagcggcgctttaccagcagatgctgcaatcagtggagaaaaattattcggacctgacgttaaggcagatgaccggcgacaccgatgcggcgcggctgtttaccacctctcacgtgataccggggatgtttacccgtcaggcgtgggaaggcgggatacaaaaggcgatagcggaggcggtggcgtcacgtaaagaggcaattgactgggtgctgagtgataaccgtcaggcagtctcggcttcggtatcgcccgaagagctgaaagcccgtttgaccgcccgttactttaccgattttgccggggcgtggcaggattttctcaacagcctgcgctggaacaaaacccgtaacctgtcggatgtcatcgaccagctaacgttgatggcggatgggcggcagtctccgctgattgcgctgatgaacacgctggcctatcagggcgaaaccgggcaacaggggccgagtttatcggactcattggtgaaatccgctaaaacgttattgaataaaaaaacgccgcgaatgattaatcaacagacggctggcttgcacgggccgatggatgaaacctttgggccgttgttggcgctgatgggagaaaatcaggcagaaggaagaatcaaggcggacagtaccctgaatttacaaaccttcctgacgcgggtaaccgacgtgcgtctgaaactgcaacagatgaacaacagcgacgacccaccggcaatggcgaatgcgctggctaaaacggtatttgaagggaaaagcactgatttgaccgatacgcagggctatgggcgcttgatagccgccagtctgggcggccaatggcgtggttttggtcagacgctgtttgtcgagccattagcgcaggcgtggcagggggtattgaaaccggcgacggcgaatctgaatagccagtggcagacggcgatagtggacaactgggatcgggcatttgcgggtcgttatccgtttgccggtggcgaaagtgaaatctcattgccgatgttggggcagtttatccggtcagattcagggcggatagagcagttcttgacgcgtcagttaggcgggatactgcataaagcgggtaaccagtgggtagtggatgaggtgaatggtcagggcgtacagattaacccggattttctaaaggcgataaatcagctcagtcagttatcggacctgttgtttgcggatggcagtcagggattgcggtttgaactgcgggccagagcggtgcgggatgtggtggaaactgacctgacgatagatgggcagaaactgcgttattttaaccagatggaaagttggcaaagttttcgctggccgggagagacctataaaccgggtgtgatgctgacgtggaccagtgtcaatgccggggcgagattgtttggtgattatcaggggaactggggactcatccgctggctggcgcaggcgaaagcggagaagctggatgaaagccgttaccgactgatatttaccgcgccggatggattaccgttaacctggattttgcgcacagaattgggcgaagggccgctggcgttattaaaactgcgcggatttaaattgccgaaaaatatctttgtagtgacgccgggtaatcacacgacaatatcagcggtaaatgacgatgatttgatagaggaatag

SEQ ID NO: 10564 - DNA, 117 bp, Photorhabdus luminescens
atgaagatgtttggctatatgggtgagaagcctgatttcacttttctcagtgaagaggcaatattgctatggggttttcttgatgttattggctatcttattattcgtgtggcatga

SEQ ID NO: 10565 - DNA, 2526 bp, Photorhabdus luminescens
atgacgaacctaacaccgatgatcatctttgatcacagccgttacagactaaaagtgtggcgcaataaagcaccgctggatgtgctggcctttaccgggcaggaagccttaagccagccgtttcgctatgccattgaattcaccagtgcggagaaagggattgaaccggcacagatgctgatgcagcaagcctcatttaccctgacctcgcctgcgatcaatccggggatacggtggatgccgattgtgccgccggagccgctgcgctcggtttacggggtgatcagcggctttaaactgctctccacttcgcgggacgaaagccgttacgaagtgacgctggagccccggctggcgctgctggcgagaagccatcaatacgctatttaccaaaaactgtccgtgccggagattgtggagaaaatcctgcgggagcgacatggttttcgcgggcaggacttcctgttcagtctggcgtacagctacccgaggcgggaacaggtgatgcagtatggcgaagatgacctgcgctttatccaacgcatgctggcggaagtgggtatctggtacaaagtgacggcggatgaccggttaaagatcgatgtggtggagttttacgacgaccagcgtgactaccagttcaatgtctacctgcctgcccgcaatccgtcaggtatgcacggcgaggaggacgcggtggtgtggggcatggagaccgcgtatcaggtggtggagggaaaaattgcgactcggaattatgactaccacgatgcccggccgtatcccggcttgaacaccgaggcggatgtgacacggggcgatcgaacgacttatggcgaagcgtaccattaccgtgacgactaccgaatacccggtgatcgttacgcctatcaaccggagacggaaagcggggtgttttatgcccgtttgcatcacgaacgttacctgaatcaacgcatccgcctgcggggaatgaccacctccgccacgctggtgccgggacaggagttgaaagtgaaaggtgacgccccggaaacgtttcgcaaaggggcgatcatcacccagatcaccaacagtgcccgccgggacagcagttttgagatgacattcactgccattccctattccgagaccgtgtgctttcgcccggagcgggtgccgaaaccggtgatggccggcacgatacccgcgcgggtgagcagtaccaaagtgaatgatacctacggcgatatcgacaaagacggcttatatcgggtggtgtttaattttgaccgggagaaatggccgcaaggcggcgaaagcttgtgggtgcgtctggcgcgcccgtatgcgggggagaactatggttttcactggccgttgctggaaggcaccgaagtcgcgatcgcctttgaagggggcgacccggaccggccctatattgcccatgctctgcacgactcagtgcacccggatcacgtcaatctctacaactacaaacgcaacgttctgcgcaccccggcgaataacaaactgcggatggatgacgaacgcggtcgggaacatatcaaactgagtaccgagtacggcggtaaaagccagttaaatctcggccatctcgttgatagccagcgcccacacccggataaacggggagaaggctttgagctgcgaaccgacgactggggcgcgatccgggccggtaaggggttgtttatcagtgcggataaacaggcccgcgcgggcggtgaagtgctggagatggaggcggcgctgaatcaacttcaacaagcgcagaccttaaccgaggcattatacggcgcggctgaaatggctaaagcggaactggcggatttgcagcaacagaaggcgctgttaagtgaaacgttagccgagctgaaaaaatccgcgttgttactctccgcgccagaagggatcgcgcagacgacggcaaaaagcctccagttggcggccggggaaaatattatcgtcaccagtgggaaaagtaccgatttcagcgtattgaaaaaattcacggtggcggcgggtgaaaggatcagcctgtttgcccaaaaactgggcatcaaactgtttgccagcaaaggccgggtagatattgaagcgcagggtgatgagatggggctggcggcactgaaagatatcacggtgaatagccatgagggaaaagtgatcatcagcgccaaacaggagatcttgctggtcagtggcggtggttatatccgaataggaaatggtcaggtggagtgtggtgcgcccaatcacatcatccaacgggcggcagtgtggcagaagtttgacgggcagagtgttagtcagacagtacagcaatggcaaaccgcgaattatgcggtaacgccgaaggctgtacgggcttataagatttctccgttagaccgtcaaaatatgcagttccatgccgaagatggcggcgtacaggcattatcaaccatacagaatggaaaaacccctttgcaaaagcaggttggggtggaaatcagtcaattgaaaataaaagatgaggagtaa

SEQ ID NO: 10566 - DNA, 1617 bp, Photorhabdus luminescens
atgatgagtgagccgaaagaaaatgagatttttattcaccctgaatatgatgaactgggcctcccttattacaacgtgccgaatgccagaattgaagaaaatctggtggcgacgtgtttgaagtacgcgactaaagtgatcccggtaattttcctgccgggggtgatggggagtaatttgaaatcgacagagggggagtcagtctggcggctaaacaggatattaagttttgatgttttaggttggatgtgctcgggtgcgtcttacaggaagaaaactttagacccgaataaaacaaaggttgatgattccggggatatcacgcctgatcacactgagaagaataaattccagacttgcaagcagcgcggttggggggagatagcccatatgagctatggcactttcctgccctggcttcaggcggtgttggatgatgagcgtctggcctttgagtactgtctggcagagaagggggaaaaaacccttcggcaacgtatggttgatatgagtttgaatgcggagtggggggaagagccgctgaccgaggcagaggttgaccatagttatgattttctctacccggttcatgtgatgggctataactggttgcaatctaatgaggagtctgccaagaggctggagcaatatgtggataaggttttagctttctatggtaaacggtgtgcaactaaaaaggtgattttagtcactcactcaatgggagggctggttgctcgttattattcagaattgctgaatggcagagataaaattttaggcattgtgcatggggtgatgcccgctacgggggcgccgaccacctataaaaggatgaaaaccggtgaagatggtgtgaccgggctggttgtgggttacgatggtgaagatatgactccggtgctggcgcagtctcccggcccattacagcttctgccgggaaaggagtatggtcgaggctggttacatatcgccgatggtaaaatgacgcataaactgccgaaatcagatccgtatgaggagatttatctggaaaaggatcgctggtgggggttatgtgaaacccggtttttaaacccggataaaaaggataagtggaaagatggagcaagctggaatagttatcggaaattgataagaaacacagtcaaaccatttattgaagagttaaccagtaagtaccatccgaatacttatgccttttatggtgccagcgagaaacatttatcctatggagttatctcctggcaagaagccagtaaggattattacaataaaacggaggattattccggcctgacatttgatcggccgatatacgatccttataacctggagacgggcgcaacccgtatggtgcagttttctgttggcccttcttttcaggatattgcggcgaaaacttttaagctggcaccgcccaaagagccgggagatgggacggtgccggtacagtctggccgtattgcagccagatatttacgcagcttgctggcaacagaagtcgaccatgaaggcgcatataaacaggataacgagacggaagagacgtttgcccggttattcactttgcgttcaattgtgaagatggtgcaagcggtgaaaggtgaaaattga

SEQ ID NO: 10567 - DNA, 1005 bp, Photorhabdus luminescens
gtgacaactgaaatgttagtgaatatgcagcctcattgtgtgggccgttatttgatagatcttcctgctggatttggcaatgttgccgaacaagggatatttattggtgatgcgcaaatagaaaccgagcgtttatatccacctgcatttgaacagcggatacggctaagagagcaggaattaaagaccatgcaatctgttgaaccgaaagatatgccttttttaaagaaagcctatcgcctccaggataatatggagggtgtgatcttcgacaggaatgaaagttttggtattcccggttttgcccgagtattagaagcgcatttgtatagtaatggtgtcgcttttaccgtaacaatgaaatttatggagttatcagatgataagtataaggaagatagagatttttatataaggcaagggttttctgaaaggcaatacaatgagttatatcaaactctggagaagatgaaaagactgctatccagaatcagcggccggaaagatacagaaatacctacagagacaggtacctgtattcctgatggttttattactggcagtcatgatgagaaagagaatatgacttttgtctataagcgagatgaaagtgatcattttactttcaatgttgaaatattgaatgatcttcaagagaaagaccatctgttagagcgtctgaggggaatggaaggtatgtttttgtccatgcatgctaagataataaggaaagggaaacgggaaattaatggcacttatacggaggaagttttaacaactgcgccgacagaaaaaattgaagaaccggaaaccaaaattccgggatataaatttattttaattgctaatgaaacaatcggggattataagaacccttttgttagaattaatctgagaaatgatcggtcatccgcaacgccgtacagtgaaaatgaactgataaagttttgggatgcggtaacgagtacttttcgtaaaagacccggtgcttttaaacggcaataa

SEQ ID NO: 10568 - DNA, 240 bp, Photorhabdus luminescens
atgattatgtttaatatgattggtttcagccatatcactgatcaaagtagaatcgtaagcgtgacagcgttaacgttctatgataaggacaaaccggttaaattaatcggtggcctgattttttatttaaatgcgaaacagggtatgcattcaatggtgatatatgattgttgttgcccgttttcgattccattacccaggataatatcgagttattattatgagttggcccatacctga

SEQ ID NO: 10569 - DNA, 1080 bp, Photorhabdus luminescens
gtgtcgcctctgcgttatcgattatggtttatcattttacttttgatattgattgtcggcacattggtttacgctgtgctaaaagataccaccgatttctatcacgcggcgatttatagcagcttaccgtcctttctggtgtggttgctattatttggtgcggtattaaatcgctatgagcaatattgcgcggcagcatacgcttgggaagaagccagtgctgaaactcgtttccaatggcagcaatggagcagaaaacaactggcggtgattggtaatattattctgacgcctgagcaacaaggtattgcgccactgttaggtgatgcggaagagatccctgcttttcctgaacaaggacgggcattatctctgccatcgagcgataggcggcaattattggctaaaatggatcaggattttgaacaacagtgtccgggttatcgttctcttttacgccagatttatattgcttccgacgatcacgcttcttatgaatctgcgatatatcaacagtggaaaataagcatcttaccgataataaaccgagatgagatcgataaattatacgatgaggatgatttcgaagggctgataatggttattgcgttccagtgctggccttctgaaaataataagaaagcgtacagtgaatttgtctcggctcaattattttcgtcgacaaaatttgccacgcaggaaaaactcactgtccttgccggtatgggaagaacattaccttcattacccggagaaataatcaaagacttacagatattgtttgaatataaccgtattgataaaaataacatgcggcacctttggataacgggtgtcacgaatgatgtcctgactgaactgacaattaacagccatgactctgcgtttaatcttttcaccgaaaattcggttcatttaattgatcatacttttggcccaccggggccgctatcgatatttttggcatcagccatattaactgaggcaattagcctgaccggtagcgatcatatcgttatcaatcaattaccagaggggagcgctagcctctatttaatgactaaggaattacatcaatga

SEQ ID NO: 10570 - DNA, 3372 bp, Photorhabdus luminescens
atgaaagttaatcgtcaccaccaatatggctattttgggtatatttttattacccttagccttgccgggatatttctcatgttgatctacttgaatcaaacattacttgaggaacgggggctgcttaaatccgtatggtatgcctacgctaccgtttttccgatcctattaataggcttatttggcaatgctgtctggtggcatattcggcagaataaagcgcagaaaaaactcagacctgaaaccgagcggacagcggatcgctccagccagtctgctttggtactgagtgacttgggcgatcgcatgcgcctccgttacgggcggttctggtggtataaagtccgcattttactggtggtgggcgaagtggagcaggtggaagccatcgcgccggggctgaccacgacgcactggcaggagggttatcgcacgctgttgctctggggcggcagtttgcaagcggaaccgaataccgctcaattgatggccctgcgtcgcttgcgccgttaccgcccgctcaatgccattgtctgggcgctgaccgaaaaccaaagtgcgcagccggtatggatggacaaggccctgaggatgttgcaaaaacaggcccaacagttacgctggcaggctccggtctacctgtggcaggtgtgtcacagtacctggtctcaggaaggtcgtatcactcagaccgtcggctgtttttttcctgaacgctgtaccccggatatcgtggcgacacagttacaaacgttggttgacccgttgcgcgagcgcgggatgcagcaactgttggagaagacggcccacgattttctctgtcgtctgtccgcgaacttgaaacaacaggggattgcgcactggcaacaggtcctgacgccgtggttagcggagtatggtgatgtggtgtcgctgcggggtttgatgttcagtttgccgcttaaagcgcagacgactcgcctcccgcagatctggctgcccgacacggcatggcagggggtgttggagggcagtcgttgtttccacggtcggcgggtgggcatgctccacacacagaccgtttgtcgtggcctgatagtgctgggcttgttatggggggccggaatgatgctctcctttttcaccaaccgtgaccagctagccgtggtgcaggcggcggtaactgacctgaaagtccagccggagaattctgatgcccagttgatggccttgaaggatctgcgtaacgaggtggaccggctgcaagaccgggctgaacacggcgtgccgtggtatgagcgctttggtttgagtcagaatcagaaactgttgacggcggtgctgcccgattatgcgcaggttaataaccgcctgatacgggacaaagccgctgcggtgttgcatgcgaaactgagtgcgctggtgaatttaccgccgggcagccctttgcgggctaagcgggcgcaagccggtcatgaccagttgaaagcctacctgatgatggcgcggccggaaaaagtggatgctgtgtttttaacccggatactggatgaaaatgaacccgagcgggccggtattgcccccggtgtctggctggatacggcgtgggatttgtggagtttttatgcggagaatctggccgcgcatcccgaatggcggataaccgcggataaggcgttgattaaacaggtgcgtcagttgttgctgctccagccaggtaagcacaatgccgaagcggcgctttaccagcagatgctgcaatcagtggagaaaaattattcggacctgacgttaaggcagatgaccggcgacaccgatgcggcgcggctgtttaccacctctcacgtgataccggggatgtttacccgtcaggcgtgggaaggcgggatacaaaaggcgatagcgaaggcggtggcgtcacgtaaagaggcaattgactgggtgctgagtgataaccgtcaggcagtctcggcgtcggtatcgcccgaagagctgaaagcccgtttgaccgcccgttactttaccgatttcgccagggtgtggcaggattttctcaacagcctgcgctggaacaaaacccgtaacctgtcggatgtcatcgaccagctaacgttgatggcggatggacggcagtctccgctgattgcgctgatgaacacgctggcctatcagggcgaaaccgggcaacaggggccgagtttatcggactcattggtgaaatccgctaaaacgttattgaataaaaaaacgccgcgaatgattaatcaacagacggctggcttgcacgggccgatggatgaaacctttgggccgttgctggcgctgatgggagaaaatcaggcagaaggaagaatcaaggcggacagtaccctgaatttacaaaccttcttgacccgggtaaccgacgtgcgtctgaaactgcaacagatgaacaacagcgacgacccaccggcaatggcgaatgcgctggctaagacggtatttgaagggaaaagtactgatttgaccgatactcagggttatgggcgcttgatagccgccagtctgggcggccaatggcggagttttggtcagacgctgtttgtcgagccattagcgcaggcgtggcagggagtattgaaaccggcgacggcgaatctgaatagccagtggcagacggcgatagtggacaactgggatcgggcatttgcgggtcgttatccgtttgccggtggcgacagtgaaatttcattgccgatgttggggcaatttatccggtcagattcggggcggatagagcagttcttgacgcgtcagttaggcgggatactgcataaagcgggtaaccagtgggtagtggatgaggtgaatggtcagggcgtgcagattaacccggattttctaaaggcgataaatcagctcagtcagttatcggacctgttgtttgcggatggcagtcagggattgcggtttgaactgcgggccagagcggtgcgggatgtggtggaaactgacctgacgatagatgggcagaaactgcgttattttaaccagatggaaagctggcagagctttcgctggccgggagagacctataaaccgggtgtgatgctgacgtggaccagtgtcaatgccggggcgagattgtttggtgattatcaggggaactgggggctgatccgctggctggcacaggcgaaagcggagaggctggatgaaagccgttaccgactgatatttaccgcgccggatggattaccgttaacctggattttgcgcacagaattgggcgaagggccgctggcgttattaaaactgcgcggatttaaattgccgaaaaatatctttgtagtgatgccgggtaatcacacgacaatatcagcggtaaatgacgatgatttgatagaggaatag

SEQ ID NO: 10571 - DNA, 141 bp, Photorhabdus luminescens
atgaatatcactacagatattccgatgaagatgtttggctatatgggtgagaagcctgatttcacttttctcagtgaagagggaatattgctatggggttttcttgatgttattggctatcttattattcgtgtggcatga

SEQ ID NO: 10572 - DNA, 237 bp, Photorhabdus luminescens
ttggcagacaacacaaaactaataaaagttcggcatgtcattatcgtcataccgggaaataacctcacaggtatttcccaaccggtagttaaccggatagaagatatttacacaggccactcaccttttcgcaatacatcaatgggtgaacagaatgagcgatttctgaattttactatcttcttaacgggtgcctataaaaatcaactctttttttcaaaaaaatacaatttttaa

SEQ ID NO: 10573 - DNA, 513 bp, Photorhabdus luminescens
atgaaaaaacaacaactgaggctggcagttttatgcctgctactggccgcctgtagccagttttcggcacaggcgggaatcattgaagcgattaatcataccaaatgggcgattaaccggttcagtgtggatggtgaaccgggtatcgatattatcggcccatatcagggcggtggtggtggttgctgctaccgggccccggagaagtggcgaccggggatgacggttaaggtggattgggagactggtgtcgctttttccgacgattttcccggctatgaaaatagagaaaaatatctggaatgggatagaaaaattagagcccagaaacgtcagcatagccaggtcgtaccagtgcccgattataccgggcagcgtacctgcggtattacagtacatttcttaccctgtgatcaggtcaaagtcaccacttcgtgtaacacctacggtagtcctaactacccaattaaagaacccttggaaatgaagggaccaaaagtatgtccgaagtaa

SEQ ID NO: 10574 - DNA, 513 bp, Photorhabdus luminescens
atgaaaaaacaacaactgaggctggcggttttatgcctgctactggtcgcctgtagccaatttccggcacaggcaggcatcattatcgccattaaccataccaaatgggcgattaaccggttcactgtggatgatcaaccgggtatcgacagtatcggcccatatcagggcggtggtggcggttgttgctatcgggctccagataagtggcgaccggggatgacggttaaggtggattgggagaccggtgtcgctttttccgacgactttcccggttatgaaaatgatgagaagtatttggcgtggagggacaagattaacgcccagaaacgccagcatagccaggtagtaccgctgcccgattataccgggcagcgcacctgcggcattacagtgcacttcttaccctgtgatcaggtcaaaattaccacttcctgtaacacctacggtagcccgaactacccaattaaagaacccttggaaatgaaggaaccaaaagtatgtccgaaataa

SEQ ID NO: 10575 - DNA, 2478 bp, Photorhabdus luminescens
atgtccgaaataaaacatcatgatcttgtctggttgccagccccttttccgtctcaggggcggttacctgccaagagttatctggtcagggaaaactgtcagcaacagagcagtcaggaaaaagcttactatcaggaactttgtctggccgccaatcgccgggtaatccgtccctgttgtaacacgttgcatgtcagcctgttttttgatggcaccggcaataatttatataacgacctttatcaggctgttcctaaccatccgaccaatgttgtccgtcttttccaggcaaccattggggcgggttatgccggaggggcatcaggtaagccgttactggataatattgagagcatcggaagaaagtactttaagtattatattcccggggtgggaacccctttcccggaaattaatgagctggattacagcaaattggggctggcggttgctagcgggggagaagaccggatcaattgggcattactgcggttgattgatgtattaaagcgcgtattggtaaacgacaaaattgatgatgttgcttgtcaaaaatccctgaaagcgatggcaaccacatggaatatgctggagttgggcggtagcaataaccgctatgaggagttttataagcagtttgcgagcttaaaacgtgaactgaggatagcccgcagtcagcccgggcggggtaagtgtaagttgttgggcatgaaattgtatgtgtatggtttttcccgtggggctgcggaggcgcggacttttgttaactggctgactgaactgtttccgccgtcgagagaagcaggccaaaaaccggctcagtgtctgcaacataaacacgatacagacccggatagcaatttacccatcagcgtagaatttctcggattgtttgacacggtggcgtcggtcggggtgccccatatgattcctgttgttgaaggtcatatggcctgggcagacggcacgcaggaactgccatcggaggaaacttacggtggtctggtgaaacgttgtgtgcacttggtctcgacccatgaacagcggttgtgtttcccgatggattccattcgccgggcggacggtacttacctgacaggcagcaccgaggtgatttatcccggtgtgcactctgatttggggggcggttatccaccgggagagcagggtaaggcaataggtgaaaccgatggtttgctgttatcacagattgctttgcatgaaatgtatgcggcagcctttcagactggggcaccccttaaggtcccgaaggaggtattacctgacgatttacaagatcaattgtggcgggcaatgagtgctgatatccagcgggaatttgatattgacacacaattagtcaaccgcttcaacgcctggcgtcaagtgactctggggttggagatgccccaacaacccctgtcagatgaagaagcggcccgctttgaaccggtgcgggcctctgtggcattggaacaggcgatgaaaaaccagatgaactggctgacggcctggcgtatcaatcgttacgccaacggcacgctgctcggtgcgccgttttttcatgaggctcctaatcgtgatgcgaaaaaggcgcattatgaacagagtgaacaggcacaaaaagcggcacaacagcaggtcgaggctaaacggaaagtgcagtggaatgaattttttcgcgatggaggaaaaacgccgccgttgttaatgcagggagtgccggattttgacccggaaaccgcccagaaccagttgcgagaagcggcagcggaatttggtcgtgactaccggggagaaagtcgtgagcaaagcaatctaaaacaatttgctattgaaactctcgcataccacatgctctatatatgggacagtaatgatgacgttaaggaatatcagcaaatgaaaacggcgggagaagcgttggtcaaaccgcttttccggcctgccccagtgggaaaaaccggccagcaggagtcacccgagtcattgttggtcgctctgtatgacaatcaggttcatgattcccgcgcctggtttatgtactctattctggacacccgcgagccggaaggcggttacttccgttaccggataatttatttcggtacggaatgtaacaagcctttatcacccctgacgatagccggcaatgtcgtcggatcgacgaccccggttggtgcagcgttgcttttcttgaaagataaaaaagtcggcaacatgttgtcggatgccgccgacaaggtacccgtcacaacgtgggaagtgaccgcgcggtatttaacttccggcgagctgatcacgctgttagctggaccggagtatagaaaagcgttcacccataatgtgggcgaagtgacccgtcagcagagggaatttcttaaagagcggcggttgcaaatgaccaaagatgatctcaaagcgcgttgggcgggaaaaacgctggagccgactccgttcaaggagcctgagaaatga

SEQ ID NO: 10576 - DNA, 984 bp, Photorhabdus luminescens
atgaaaactgaaatattagccaatatgcagactcgttgtatcgggcattatctgattgatattcccttggcatttgaaaacatcatcaataatgagatatttattggtgaggcaaaaatagaaaccaagcgtacgcatttatccgcatttgaacagcggatcgagataagagagcaaaaattgaggacgactaagactaccgatccgaaagatctgccctttttaaagaagatttatcacctccagggaaacttatatggcgtgatttttgacagaaataatagtgtcagtgaacccggtttttcccgagtattagaagcccatttatatgataatggggtggcttttattatagaaatgaagtttacagaaatatcagatgataaatacagttattcaaaggaccgttatataaaatccggattgaatgaaagccaatataaaatgctttctcaaactctggacaaaatgcaaaggctaattaccagagtcagcggcagaaaggatagcgatattccgacagtggcaggaatctgtatccctgacggttttattgccgactataatgatgaaaaagaaagtataaagtttgtctatcaaggaaatcaggatgacaattttacgctcagtgttgaaatcattaatgaccttaaaggggaaggcactttacttgaacgtattagtgaggttgaaagggattggtttattaattatggcaagataataagaaagggggaaagagaaataaatgggatttatggggaggagttattagcagtaggtctgcaatcttttgacaatagcccgcgttatcaatttgattttattgcaaatgatatgatgttggatgataaaaaaatctgtgttgttattatgttaatgaattatcagttacctgcaacgccatatagcgaagatgaattgatcatgttttgggatgcaataacgaaaacttttcgtagaggaccggatgctttcgaatag

SEQ ID NO: 10577 - DNA, 1761 bp, Photorhabdus luminescens
atggatgatttaaccctgcgctattatgaggcagaaatgcgctatctgcgtgaagcaggcagagagtttgctaaggcccatcctgaccgagcagccgcgcttaatctggataaaatcgttatgcgtgatccttttgtggagcgtctgtttgaaggctttgcttttatgatcgggagtctgcgtgagaagctggatgatgacttgccggagttgacggaagggctggttagtttgttgtggccgcattacctacgcacgattccgtccctttccattgttgaatttgggatggattgggcacagttgaaaaattcggtacaggtgaaaaagggttttgagatcctttcgcaaccgatcggcccaagcaagactcggtgtcgttataccacaactcaggcggtccagttactgcctctggcactgaccgacgcttccctgcaagaggaaccgaatgggcgttccgtgattcgattgcgttttgactgtggaacactggtggactggcaccaaattgatttgagctgtttaccgctgtatctcagtgctgacagtccgctggcctatgcgttacatcgagcgtttacgctgcaaacccaacagctttacctgcgtttacccggtcagcccgatcgtcagccatttgacggccgattctcaccaatggggtttggcgaagaggaaaggttatggccgaaaggggaaagttcgttcagtggttatcaactactgctggagtatttcactttccgtgaaaagtttatgtttgttacgctctgtgggctggaaaagttgactctccccgagagaacgccgtggtttgagctggatgtggttctgcgtgaaagttggccctttgatttgccattttctgccgagcatatccgtttgcactgtaccccggtgattaatctgtttcggttggaatccgatccgcttcaactggcaccgttgcaaactgagtatttgctgtatccggtccgctatcaggatgggcataccgaggtttattccgtggatgaggtgtcttcttcgaaacgcgagggccatcagtatgtgccgttcagtagtttccgtcataaaggcggcatgttgcgccatgatgcaccggagtgctacttccatacccgtgtgaaacgcgggccatcaggtctgtgtgacacctggattattctgggtggagcggattttgatgataatgaactggacgaagaagatatcttatctctcacgttgactggcactaatggtcaactgccgcgtagggcgttgcaggatacgctgttgaataccgccgttaatcctccgttggcggaatttacggtacgtaacctgtgtgaaccgacattgccctgttatccacccaatcgggaccgtttccactggcgagtgctcagccatctgggttctaactttcttagcatgatggataacccggaagtgctacgcgggacattagccctgtatgactggtccgacaatgagatgaactatcgccgtctggaggcgattgtcgcggtgaagcattcgctgattgagcgatttgagcagggaagtttgcggcggggcgtgcacattgaagtgacattggatagcaacggctttgcaggtgccggtgatatctgcttgtttggcgaaatgctcagccgcttctttgccttgtacaccgatattcatctgtttaaccgacttacgctgattttacaacctacgggggaacgactgttatgggaagaacaacactgtcagaacattcccggttga

SEQ ID NO: 10578 - DNA, 1089 bp, Photorhabdus luminescens
atgggaagaacaacactgtcagaacattcccggttgatggcaatactggaatcggagatttcgacactcgatttctaccaattctgtcagatgattgaacgtgcagttcctgatcggccgcctctggggagtacggaaaatccggttgatgatgcgatacgtttgcggcctcatcctggtctgggatttcccgccagtgaattgaaagcgatagaaactgacagtgaacatccagagcgtccaccgacagccagaacaaactttatgggactgtatggagtagattcttcgttgccaaccgcttacctgaacgatatcgttcagcaaagggaagggaatgaaactatcgaagcctttctggatatttttaaccaccggatgttcacccagttttatcgtatctggcgtaaatactcctatccggcaacttttgctaccggaggaaccgatagaacctcccaatgtctgctcggattgattggcttagggataccgggtagtcagcaacagattgccacgccgatgtcccgttttctggcgctgctcagtgttatgcgtctgccaactcgaaccgctgaaggcgtatcggcgctggtggcattgttggcaccgcaaacccggatcgtggtgacacctgcttgcccgcgacagatccatctgatgcaaccggcgaatctttcagacactcaccgaatttccctctcgcagcgtaccgtgctaggcagaatgggcactgatatcaatagccagttattgctggcgctgcataccgattgcccggatgaagcgtggggctggttgccgggcgggcagttgcacactgattttttggtgttgttacgggtttatttaggctggcgataccaagccagattgcaactgactctgccgacccgaatattaccgccaccgctgctaggtggtcagcctgttcggttagggctaacaggagtattagggttaaaggctgaaaatcatcagctagcagtgcctgacaacattacggtgaatttggggtgttatcaggggatatcaccagacagcaatcaagacaaagggggagattatgttaactatccctttttataa

SEQ ID NO: 10579 - DNA, 540 bp, Photorhabdus luminescens
atgttaactatccctttttataaaatggtgccggtaatggcgacgatagcattactactgacaggctgtggtctgactcagaccgtgactgatggcacggcagcggccacccggtccttttttcataagcgggtgaaaacgttgcatctggattttattccacgggcagcggttaataccgacacgggagaaagtgttgctctgtccgttccggcattagttcgggtttatcagttgcgggataacaacgctataaaaaaggtggattatgcggatttgttggatgacggcgaccggatactgggcgctgattgtctggcgagtgaagaggtagtggtgaaaccgggtagtcacgcatcgcttgatatgccgatggcggcgcaggcgaaatatgtggcggtggtgggattattcagaaaccccgatgtagccaaagggacttggcgtcggatcataaaacgcaacgagttgttaccagatagtcctcgtattattgcgcttaatgccggtggcttgactttattacctgaaaaggggtga

SEQ ID NO: 10580 - DNA, 429 bp, Photorhabdus luminescens
atgaaaaaaccttctctgtatgaaagccttttcggcaattttaattgcggtctggagttgcatcaggtgagtgaagaagagcaagttattttgtcggtattagacaatatgcagcgtatcctcaatagtcgtgccggttcgcttacccatctgcccgattatggcctgcctgatctcaacactattctgcgagggttgcctacgtcgtcacagcgcttgatctcgacgattgaacataccttgttgacttatgaaccgcgtttgaaacgagttgatatcacgttattgccggagctggcaccggggcatctgcgttatgacatcaatgctgaactcaaaggtgtggggctggtgcgtttcagcactgagtttgtaccggaagggaatgtgttgatccgccatttacgccagcaagggtatgtggattag

SEQ ID NO: 10581 - DNA, 669 bp, Photorhabdus luminescens
atgaagaactatataatatcacctcaaattatcaacacgatggaaatcagcaatgagccgtggggaataaaagatagttcttcaaatttcatttatggtaactcagcaacaaagaaatatattcataattttaaagcctcatttaattatgatgggctttatgatcatgaactcccttggaacggcgctgaatttgctaaggaatttattattcaagacagaatggtcatggcaaaagaacagagaatatgttcagttgaaacacatatattcggacaagatcaaatcctgtcatcttacttttgtgaaaaattgcctttttatcatgaagatggaaattgtatcggcgtcatgtatcattgttgggaagccaaaagctactcattagccagcctacatcaatattataaagaactaccgacatccattatacttcaaccaccaagcgatatttttacgccacgtgaatgggatatcatttttttctttttacaaaaatacaccaggcaacaaattaaacagatattaaatattgcttatcgcaccattgaaacctatatggctcagatatataaaaagataggaattcattctagccaacaactggaagaatactgtttagcgaataattttcatcattatgtaccagaaaaattcttattgtcatag

SEQ ID NO: 10582 - DNA, 687 bp, Photorhabdus luminescens
atgaacaaaattaataaggtagatatttcaccttcagttattaacaccatgcagcaaagtaatgaaccttgggggatcaaagataaaaattcatgttttatttatggtaatttagcgcttaagcatatccagaatcttccagattcatttgattatgaagggcaatatgatgatgaaattccctgggatggagcggggtttgcaaaagaatttgttattcacgataaaactgtaatggagaaagactcaagagtatgttcgcttgaaacacatatgttcgggaaagataattttctttcatcttatttccaagaaaaatatccattctataatgatgataacgaatgtgtcggtaccatgttccacggatggaaagctcaggatttctcatttacccgtctattttatgggaaactaccatcatctattctgttctctccaccaaccgatatatttacgaaacgggaatgggatgttattttcctcatgttacataagtataccagtaaacaaatcggtaggatgttaaatatctcctatcgtacggttgaaagccatttctcacgaatatataaacgaattggtgttcattccagtcgtcaattagaagactattgtcgcacgaatgactatgacctctacgtgccagagagatttgtgaaacggaaaagcaaaatgttttcttag

SEQ ID NO: 10583 - DNA, 690 bp, Photorhabdus luminescens
atgtcaaacatacgaaacaaatccacccttattacaccacaattaaccctgatgtgggacaaaagcaatgaaccttggggtgccagagatcatcagtcaagatttatttatgctaaccctgctttctatcaactactcaaccttcctgaagatttcgatattatcgggcttaccacgggtgaattgccctcgcctatcgccgaatatgcagaagaattccaccgtcaggatcaaaaagccatccaaactatgcaacgcatcacttcactggaaacacatcggtttggagaaaataacgtccaacaaagctatatttgtgataaatttcccctttatgatgagaataatgattgcattgggatcttctttcatatgtatcaacctcaagatttttctgtttcttactattatgacaaaacattgccatcaaacctgcaatttacgccaccaaataatatattgacgcaaactgagtgggaagtgctttttctaaccctgcgttcacaggatgaagagagcatcggtgaagaattaacgatgagcacagaagatgttgttaatcatattcagtcaatttaccagaaatttaatttaccactacagatagaattagcggatttctgtcagaaaaataactatcatctttatattcctgaacgttttatcactattggcagtagagagttataa

SEQ ID NO: 10584 - DNA, 642 bp, Photorhabdus luminescens
atgccagcaagattggtaaatcctgaaaaggttaatgaggttttcgctcatctgaatgaaagctcagataatcataccctctatactgcgttgatgaatggggttgatattactgatcagataaaagggttgttgctttcaccaggttatcgcatggttcgtgttgatggtcgatttggtaatcgtatcagtcaatcccacttcgagttggcattggttaacgatgtgtctaaagaagttgcctattataatcgagtggttatacagccagatgtggtatcaaattgtcgcccagtaacccaaattcttgtttggcgtatcaggacgcctcaacaccgcgctgttctacgtgatctggctggtaaggtgttctttgattacttgcttgaacattacaacgtgattgtgtcggatatgaatcaaacgacggatggtatcgctttttggcaggatagaatgtacgacgcactagcatataatatgcatgtttatgcttatgatatgattacctgtgagttgcgtaagattttgacccagaatgatgttagtcgccaagaatcttggttatggggagatcctgaacaccatcagaatagattggcaattatttcgaaaagtgaattacccatctatggggtataa

SEQ ID NO: 10585 - DNA, 10587 bp, Photorhabdus luminescens
ttgtttatggggaaatcatcaaaccgcagtgcagaatatttctttactggaagatactacgatgatgatgatggcaataatattgttgccattggtgtcggagggattatttatgccaaaggaggagatgatcgtataaccctcgggtcaattggagcaacggtctatgctgattcgggtaataaggttgtcaatggtggtgccggatatttaaaaatagtggataaggaaggtaatctggccgtacatggtgccgcaggttattcaggaattgataaatgtggtaatggtaatatttcatttaccggtacggcggggggcgtttctatggatcaccggggtgaccacggtgatctcaatttttcaggagcagcggcttataatggcctgaatcgccaaggacaatccggtaatgtgacttttaacggtgttggtggttataacgaattatggcatgaaacgaatcaaggtaatttaaattttgccggcgctggggccggtaataaaattgaccgtacctggtatgatcactatgagaaaagccacggtgatgtgaaatttgacggtgggggagcagcgaatagtatcagttcgcgggttgaaagtggcaatattaatttcacaggtgtcggggctgataaccaccttatacgtaaaggtaaagaaggcaatattattttgcatggtgcaggggcatcgaaccgtattgaacgcttgcgtcaaaatcaagatcaatatgaacagacccacggtaatatcgaatttgaaggcactggtggttataaccgaatttattctgatattgctcatggtgatattaccttcgaaggggccggtgcttacaatgaaatatcaagaatcggcgaagatagtgattctcgtaatgaagcactggaatatgctaaagctgaagagattgtattaacaacagcaatgatgggagggagttggattcagcaatcccaacaagtaaccggtattaaatcaacggccgagcctgacacttatctctttgcatttgccgacgaaatgtacactaagattagtaaagtccaactccgaaatgatcctgaaaccggtaagctcagttattacgccacttcttggtacaaagagggcaatcaccttaataatcttgctacggagaatatctcttcaagtaatggatttttcgatatacgttccaatgggggttaccgtctctttaatctaatctttgaacatcatcaccccgttattattcagcatactgttgaagaagatttgcaggaaaaccagtgggtgacttatgccggtggaaccaatgccagagcagaaaatgtcatgctgactaatgccaaaatgcatgggaatgcaatccattctggtggtttgatattagatgtttcagcggtgaaatctaaccgtcaagcgaacacgtatatctatgccaagtatgttgagtcatataccaaagtagtgatggttgagttgagaaatgatgctaaaaccggtgcgctgcaatattacgccagtgcgtggtacaaagcgggtgatcatacaagcaatctggctgctgaaaaggtttccccccaaaatggttatcgctcaatggatataggaggatattcgttaaccaatctgcaataccaagtgaatacagtgcgccgtgtttctgaacatttagcacagacagaagaatatagtcatcaggagttggtgaaatcatccgcggatatgggtgacagctccggtgacattaatttcaagggcatgggcggtggcaatgtcattacctccagtgtaactcgtggcaatatcaattttgaaggcgcgggtgctgctaatgtcatcgtgaaaaagggggaacagggcgatttgacgttccgtggtgcaggtctggcaaacgtactggttcatcaaggccaacgtggagaaatggatgtttacgccggcggtgcagcgaatgtattggttcggatcggtgatgggcgatatctggctcgtcttttggcgataggtaatatctcgatccatcaaggcaatggcgatagccgagttagcatgtttgggggttacaacactcatagccaaataggtaatggcaacgccaattggttaggtgcaggcggttttaatgtgatgacccaaacaggtaaggggaaggtctcctcggtactggcggggggtgccaatgtgctgactaagcttggtgccggtgatttggatgccggtatgcttggtggtgcgaatattatcacgcatctcaacgatggtgaaatatcaggtaccacggcggttgcgttagggggggccaatattctgacgaaaaagggcagaggtaaagctattgcgctgatgggtggtggtgccaacgtgttgactcacattggcaatgggagtacgacggggatgatgttaggtggcgctaatatcttgactaaagtcggaaacggtgacgccacgggtatcatgctcggcctgggcaatgtgttgactcatgtcggtagcggccagacgctgggagttatgggagccgcaggcaatgtttttaccaaagtgggtagtggaactacgattgcggccatgattggtgcaggcaatatctttacccatgttggtaacggtgatgcatggggattgatgggaggtttggggaatgtttttaccaaagtggggaatggtaaagcactggcattgatgatagccgctggtaatgtgtttactcacattggtgatgaaatgagtgttgccttgatgttggctaaaggcaatatcgccaccaaagtgggcaacggcatgatgctggcagccatgatcggtgaggccaatgtgatgacccatattggtaatggctcaacctttgctgcgatgatcgggcagggcaatatcctgacgaaagtgggcaatgatttggcgctcggtttgatggtgggtgaggccaatatctattcgcatgtaggtaatggcaccagtattggcttgtttgctggtgagctgaatgtaatgactagggtaggtgatggcacaacattggcggcaatgtttggtcaagccaatatcatgacgcattccggcaatggtttaaccggcgttttagccttaggagaggcgaatattgtcaccaaagtgggggatgattttatgggagtggttgcggcggcggaggctaacgtcatcacccataagggatcatcaaccactgctgccgtgctattcggtaagggtaatatcctaacgaaagtgggcgacgggaccacagtcggcttacttatttccgatgtgggtaacatcatgacccatgttggtgatggcacaacagtgggctttgctaaaggtaaagccaatatcattaccaaagtggggaacggtaccggcgttaatgcggtttggggggacgcgaatattctgacgcaggttggtgatggtgaccgttataacttcgccaaaggtaaagcaaacattattaccaaagtgggtaataatcaggaaatcacggttgttcagggtgatgccaatatcatcacccatgtggggcaaggtgatgattataccggtgcttggggcaaagctaatgtgattaccaaggtcggtgatgggcgcaatgtcgtgcttgccaaagctgatgctaatattgtgactcaggtcggtaacggtgacagctttaatgccttgtggagcagaggaaatattgtcactaaagtgggtgacggtatgcaggttactgcggcaaaaggtgaagccaatatcacgaccaaggtggggaatggtttaagtgtcaccgcgacgcatggcgattttaatatcaataccaacgtgggtgatggtatttctattaacgcagcgtggggtgaatataacgttaatactaaagttgggcagggtctcaatgttgcgatcatgaaaggtaaaggcaatgccaatattcatattggtgatggtctggggattaatgcctcttatgcccgtaataatctagcgattaaggtgggtaacggcgatttctacacgctttctattgctgaaagcaatacgcaaagtaataaccttccttttctgtttaaaagtattaaacgaactgtgttaagtgtggaaggtagtcaggcaattaactacctgattcacggtaatgaggcgaatagttctggtacatatagaagccgaggggcgattaatttaactgaagtttctgccattgatggtttccagatgaatgccatcgatgatgttggttcggatctgcgtgataaattaagcggcacagtaactcaggtggagattcctgatactgaggctatccagaacgccttgcatattggagacaaagttgattcgacgcagagtgaatcatcatcacaagctgacgctgttattaaacaggcaaaacaggacagcgctgagcaaaatgcgttaaatgataaagagaaggcggaggaaaattatcgcattctggaacaagaaagggataaccaacttaaagaaatttcaaaaccacaattccaattggaatcaacagatcagaatgtgctgaataccaatgggcaagtacagcgtgatgcaataagtggagagtctagggcagtaacgaaagagttgctttccatgactcaacgtctgaatgcgcttaatgacgatgggaattacgctggggaattgggtgatgagtggcgtaatcggtttgctgtgggatatttggaccgtattcaggagaaattagatgacaccaaattgatctcacagaaaaaattagctgatttatcgccgcgctttattgataaccaacaacaagtcaaaaatgcagttggtaaatcagaaacaggtttagagcaaagttatcacaatataaagaacgcagacgacaatattgaggatgcgcatacaaaagcgaaatcaagacagaaagaagcagatttacaacgtctgcgggcaacaaaagcggaaagtgacgcctatgccgtgtatgaagaagcgaaacaacgcggtgaacatgatagctcggtagcgaaaaataaagccgctcaggtacaggctgatgcgaaaggtgcgaaacagactggtgatgtaaaacccgagcgtagcggggcgaccggcagtggcttgtctgggaaggcttatacaccaatcgacgtagcgaaaccgaaaagtcatatcaatcctgaagccaaaatggaagctaatggctggaacagtgaagatctcacattaacagccgcagatttggcgggattgaatagtgcgcaacgggcgattaatcggctacagatcaacaggagtagtcgccctgagaatgtcggtgcttcgatcatttcgctgcttaccggaacgccatctgatagggttgtggaacctatctcgaatcaaaccagaaagttaatcacaacagcccctgtaatgtcgggtatcaatttgcaagggttagggcaagttatcggtggagatagctttaaatcccattcttccatcttgagagagtttgagccttttttgctgagtcagggtgacaaacggtttattgcttcaacgaaaagatatcttggtcagataaataccgatcggcccagtaaggcgctggtggcagtacgtgaggcgttcaacaatgcggccgaacaacctgatgaacagcatgtgttgcaacttgagcaagcgcttgctcattggcaacagcatgatcccaatgaatttgccaagcgtggtcgattagtcaaaagcctgcgttttgagatgggggaactggttgcctaccttcaggcaaaaagagctgaatcagccgggattttaggggttagcttagcgcctgaccatgttgcacagtttgaccaacaggtatcctttgacgggttcgggcgtgtggtgggtctgaaaggcgatatcgcacaaagcgacattcatcgtcttactgatttacaaatcaagccattgacccagattaactctgcggcggagcgggaagcgcctaaaactgaaagtgaaagtctcattgttttcgttagccgattgcaacaagaagcgattcccgaagggatgccgctaattgaacgagccaaaaacctttggcttagcggacaagtcacacgacaggaaaccattaagctatttgaggatgcggttagccaattgcagacacatcctgaattacacacgttagctcagcagttattggctgatgctcgtaaagaaaagaccacgggacaatatattgacaacctgtttggccgccattttgattctgaattggccgatgagttggtgaaaacagcgccacaggatgctatgaccacagcccggcagacaggacaatttctggtagagagatttgaacagtggatagggggtttttatcccgatgtcgccgagcgtgaaaagattattgctaaaaagatggccggctttgccagggccattaacaaggactttcgtccctggtttagtcgggtacctgaattgacgacgttcctggacgaaccgacttttgccaatttcaaaatcatgatgactcaggttgatgatggttttgctgtgattaagataccatttctggccgtaaaaatggccattacctcaggaatggggatggggcgtgcacagtggaaggttgcaggggatcgcttctatgaggaggttatcaccaaagcccgttcgaccagcagtcaactgactagcggggctgatgtcacatataacgttgaaataactgaaaagcagactaacgattatggtacagcgttgccctaccagcctgctaataacaagcatgatgactttttgtatggcagaaaggttgctgcgggccgaattttggtccccggatgggaaacgagatttgagcataatgcgttagcgcaaggccactctgtggtgacaggagcctccggctcgaccaatatcatggttcacctcaataactatattgctagtgaacagattgccagtgaacagcctactttctcggttagacagagctatctcaacacgctggtgtttctggtatttgatggtggtcattctgtcaacgaaagtctggcggtttatcgggcactacaggtaaccgatgatgaacaacgtaagcagttactcaatagctacactgccaattatagggagctggtggatattgccggtgaagaaggcaaagtgtgggtaagccaggcgctggataacgctttccgggaaactggggagttctatcagaaacatgccaaggtgaagccacaaagtcgcccagcggtggaagcgttagactggttatcgggtaagaataagcggccagagcctactatcatcgacgatactcatcaggataaaaaaataagcagactactcggtgattggcaaatggagcaggtgacgccacaagctgatggccgtgaaactcgctttgatggtcagatcattatccaaatggaagatgatccgatcgttgctaaagccgcggccaatctggcgggtaaacactcagattctagcgtagtggttcaacttgattctaagggcaaatatcgtgtggtttatggcgatcttacccgattatccggtaagttacgttggcaggttgtcggtcatggccgtgatacgtcggaacaaaataacattcgcctgagtggttacaccgctgatgaattggcgaccagattaacgcggttttatcaggacgttaatcagggtaaaagcataactcacaaacctgatcacatcagtattgtgggttgttctttgataagtgatgacaaacgggatggctttgctcgtcgttttatcactgtgttagataagcaaggcattcgcagtgatgtttccgctcgcagtagtgaagtggctgttgatgtcagtggacgcaaatttacccgtgatcaaaataaccaatgggttaacaatctgcctgataacaaaatcgtattaagttggtatgaccaaaatgagctgatcacacataccgaactagttcgccgtggtattgccgaaagtgatattaacttctccaaggtagggtataccgaagctgatactgttattaacggagcgatctcgggtaacgttgaactatttgttaaaccaaacaaacgtgaaaatacgattcagattgattccaatgagaaaacgaataatcaactcagttactccggcaatatccaggtgaatgtgggagatggggagtttaccgcactcaattggggaacctcgaacgttggtatcaaagtgggtagcggtggttttaaatcactggccttcggtgataacaatgtgatggtgcacatcggtaatggtgatagtaaacagagcttcgatattgcaggctatcaagcgcttgaaggagcgcaaatgtttatcggtaatcgtaatgtcagcttcaaccaaggtcgcagtaatgacctgattgtgatgatggataaatccattccaacgccgccattgattaatccgtttgatggtgtggcgcgtattgccgatgtattgcaaggtgtcgcgggtgccagtgaggatcaggattggttagcggcacaagatcagcaatggaccattgccggtgcgaagaagttcgtacaggatctctctggcttagaccaaaccagcaatgtggattacaacacgttggttgagctggattcgcaacatgaacgtagcagccgtggtttgaaatatgatgctgaattaaccttgaacaagaagtttaatcagtggctaggggaacatggcaatggcgctgatatgggcaaaataagtcgcatggataagtttcgtcaggctaatcagaagctggccttcaactttgctgtaggcgggcgtggcgcggatattcaggtgacaaccggtaactggaacctgatgttcggtgaccatatccagtcgattctggataccaatctgggttcgctgtttggcctgatgacacaacaatattcagcaactggcatggcgaagaccacctttacctataatccacaggatttgccgcgtcagcttaagaataaactgattggccgcttagcgagtgtaaatgcagataccaccttagcggatatttttggcgtgaactacaccgcagaggggaaaattatttcccgcacaggcgaatcggttgatggtgaggcgattctacaagagatgttggaagtgattggggagtttagcggtgatcaactgcaagcgttcatcaatccagaaacgttacttgatagcctgaaggcgggtattgatatgggcgaggagggcgtcaggtcatttgcggagagtcatggcctgaaacagaaagcgcccgatgagcgtcaggaatcaggatcttcggtgaatatcaatggagaaaatgttcagaccaataataaacccaagcctgcatttggttttaattcgctgaacttacctaatctgtttgcaacgatgttcagcgaagagaagcagcgggagatgaaatcgttagtggctaacctgaaagaaaatctgacgactgatctgcttaatatggaggaaaaaacgtttgatttcctgcgtaacagcggccatctgcaaggggatggcgatatccacgtatcgttggggaactataacttcaactggggaggcgacggtaaagatcttggtacctatctgggcgataacaataacttctggggtggccgcggtgatgatgtttattactcgctagggacttccaatattttttcaggtggtgaaggcaatgacttgggcgtcctgatggggcgtgaaaactggatgtttggcggtaagggggatgataccgcagtggtggctgggcggattaaccacgtgtttatgggggaaggcaatgaccagacatttgtctttggtgaaggcggttttattgatgctggtaacggacaagattacgttgtcaccgctggcaactataaccggatggatactgggaaaggtcaggattatgcggtgatcattggtaataataatcaagccgaattgggtggaggcgacgactttgccagagtatttggcaatgacaaccggcttgatggttattgcggcaatgatgcgattaagctgatgggctaccatgcggtgatcaatggtggagaaggtgatgatcatctgatagccgcggcgatttcgaagttcagccagcttgatggcggtgaaggtcaggatttgctggtattaggtgggtatcagaaccatttccggggcggtgcaggtgtggatagttttgtggtcagcgaagaagtgattgataaccgagtgagcgatattaacgcagaagatatgatcttgtttaacggtgttgactggcaaaatttgtggttgcagcgtagtgggtatgatctggtgctgtcagtgaagcgccatactcaggacaacacggctcaagggagatttgaatcggagggttctgtcatctttaatgattactttaatggcaatcgtgccaaattggtgactcggatgagtgataagaacgcgtcaggggaacgcgaatttacggcattgtcagataatgccgtggattctttgatccaggcaatgagcggttttgctccggcagtgggtgataatggttttattgcgggtctggacagtcaggcgaaaacggctatcgcaacggcgtggactgatgtgacgattggtaaggggaaatttgcttaa

SEQ ID NO: 10586 - DNA, 561 bp, Photorhabdus luminescens
atgttttgcgaagaaaaagtagcccaaatggctgcctacttgctgtataagcgcggcgggcgcatggcatatctgaagcttatgaagttgctttatctggcagatagggtatctatgaatgactatggctatcctatcactggcgatcgaatggtatctatgccgagagggccagttttatcgcaaaccttaaatttaattactggagattacgccagtgatgaatttgggtggggggcatggattaaaagtgaaaagaattatgaaatttcactcaaacggaaaggtataacaagggatgattttgaatctctttctgatgctgaattagaagttctggatgccatttgggaacaattcggtcatatgagccgctttgatattgtggagtatacccataaacattgtactgagtggcaagatccaggcggcagttcttatcctatttcaccaagttctgtttttattgctgtcggtaaatcaccagaagttgctgagaaattggcgcaagagttaatagaaaggcaacaactggactgttttcttcaaggattgcggtga

SEQ ID NO: 10587 - DNA, 402 bp, Photorhabdus luminescens
atgccgggtgggattttaaggaaaggaagtttacttatcccatctggatatacagatcacttatatattatctgctgtgatccagttttttaccctaaaaaaacgaagacatgttttttggctgtaaatattagctctttaaaactggacataccgtatgatcgaacgtgtatattgaattgtggcgatcatccttttattagacatccgagttttgttttctatggtcgcgctgatatttttggctcagtaaccgttgaacagcatatggctgctggtgatattaaaatccatgaaccatgtggtgattctgtttttgatcggattctttctgggtttgatatatctccgcatgtaactttagaaattagaaatttctataaaaaatattgtattaactga

SEQ ID NO: 10588 - DNA, 1554 bp, Photorhabdus luminescens
atggcaaaaactggaaacgaaaggttggcagaagcgctgagagctgcaagcgatgcggccgtgggcaacgtgctgagttctaagtcaatcactgataaacaacgcacacttctgatcaataaaggctatttcaagcaaatcatcagaggatggtatctcctggatgcagatctcaccactgaaaaagcgggtgattcagtactttggtatgaatccatctggtctttcgttgggcagtacgtcgaaagtatcttcgaagatgattactggctaagtcctgaatcctctcttgatttacatacagcaaacaatgccttaccaaaccagataatcgtctacacctcagacacgacgcctcgcacacttaatctacctaacaacatgagtatggtgatcatcaagggaagggttccctgtaagactgtcaaagtaaacggtataaatgttcattcgttagaaagcgcactcgttgaaactggcccacaaactttcagagccaaccctataagcattcagctagcactcaggaatgctgatctgagtctgctttcagaagcagtactgacaaccaagaatgttgcttcagggaacagattaattggtgcctaccagcagctaaagatgagggccgaaagccggaaactacaaaccatcatggaaggagccggttttgaaggtattaagcaggttaacccatttggccatattccgatgatagtaggcggtagtcggggagaatccccaagcgcagttcgtgtgaggctcttgtggcaggagatgagacaagaagtcgtcgaggtatttgatgactttccaccaccttttgacttctttgagcgctcaatcgaaaaaacacacgccatgatgagcagcctctacataagcgatgcctacaactcactatccatcgagggttacaaggttacgccagaattaatcgagcgtctgtctaaaggtgactggtcgccgaataccatccaaagggacaaggagcagaaggatgcaatggctgccagaggctattacgatgccttcaacaaggtgaaagagctactgcgtgaagcacatgaagataaggaaggcttggacatccactacctgattgacgttggcttgactgactggttcactgcgttgttcaatccctgtgtagatgccggaattatcgacagactggatttggcgggatttcgcaaaggaccaatctatatccgcacttcaatgcatgtaccgccctccagcgagcaattgatggactgtatggaagcactgaaagagttgatcgctactgagaaacactttgtggtaaaggctatcttggggcatctttttctgggttatattcatccgttccccgatggtaatggccgcactgccagattcttaatgaatttcttgctggtaatcggaggatacccctggacggtgattaaactcaaaaatagaactcagtatctatcagcgttagaatcagcctcggtaggaaagaatgtgaagccatttgcagagttcgtgcagcaatctatgcaggaggtagaacacaatatgaagtga

SEQ ID NO: 10589 - DNA, 108 bp, Photorhabdus luminescens
ttgagttccttcaaagtgctcgactatttgcaaagttatttagagcaaattaaccataatattaataacagtattctttactacaaagttattaatttttttatttaa

SEQ ID NO: 10590 - DNA, 1017 bp, Photorhabdus luminescens
atgggcagtaccggaagtgtcagtgcgtgggatgaagcgttattaattgcggctattcaatatcctgttcctattattaggggacctgaagatattcaggttcaagtgcagcagatttgtaaaacaatggattcaactaaagccggttatcctgacttggattttattgtatttcctgaatattctgctcagggattaaataccaagatctggacctatgatgaaatgttattatcgttggacagtccagaaattgactgttttcgtcgagcttgtattcgtaatgatgtttggggtgtgttttcaataatggaacgtaatgaagatccgtcacagataccttataacaccgcgattattattaacagcaatggtgaaattgtattgcattaccgtaaattgcagccttgggtgccgattgaaccctggatgccgggcaatctgggtatgccggtctgtgaggggccaaaaggtgcaaaattggcggtgtgtatttgtcatgatggtatgtttcctgaattggcacgcgaagccgcctataaaggttgtaacgtttttattcgcatttctggttattctacccaagttaacgatcaatggatttggacgaatcgtactaatgcctggcagaacttaatgtataccgtatcggttaatctggcaggctatgatgaggttttttattatttcggtgaaggtacaatttgtaattacgacggtaatattatccagcaagggcagcgtaatccgtgggaaattgttaccgccgaactgttcccgcgtctggcggataaggctcgtgagaattgggcgctagagaacagtatttttaatctcggttgccgaggttatgtcggtaagccgggcggagagagagctaattatctgacttgggtgcgcgatttggcaaacggtgaatataaactgccttgggatgaaaatatccgtattcgtgatggctggaaatattacccagaaggtgtgaaactggggccattaccgaaaatcgatgaataa

SEQ ID NO: 10591 - DNA, 939 bp, Photorhabdus luminescens
gtggcaaagaaagaaaaacggcctcaccatgacggattatttaaatattttttaacgcagcctgaaacggccagagagtttctatccctttatttgcccgaagaaatccagtcgttgtgtgatttagccacattgaaactggagcccggcagttttgtggatgagcatttacgtcaactgcacagtgatgtgttgtactcggtcgaaacggcccggggacagggctatatctattgcctgattgaacatcagtccacccctgacccgttaatggcctggcggctgatgtattatgccatgttagccatggcggctcacctgaaaaaaggccatactgaactcccgttggtggcacctctgctgttttatcatggtgagattcggccgtatccttactcaaaccggtggctggattgtttcacgctccccgaacaggcggctcgcttataccgtcaggcgtttccgttggtggacgtcagtgtgctcagcgatgaagagatcctgacgcataaaggggtagccctgatggagctggtgcaaaaacatattcgctgtcgggatatgcaggaatggctcctccaattggtggaactcttgaatgcagggtataatacaaccgagcagcgcaatgtggtgttacgctatattttactgaatggacatacgctggatctctcacattttgtccatcaactgattgaacaatctccggagcatgaaacgatgttgatgactattgcagaacagcttgaacaaaaagggcttgagcgaggtatcaagcaaggtattgagctaggtcgagaggaaggtattgaactaggccgagagaaaggtaaagtggaaacggctcgtgccttattacggcatggcgtgagtttggatattattgtcaccagtaccggactgagccgggataaaattgaaatgttaaagcattaa

SEQ ID NO: 10592 - DNA, 255 bp, Photorhabdus luminescens
atgaaagtgttaacttactcagaagcaaaacaaaatctttctgaaacgatgacaaatgtcgtgaacgattgtagcccagtgattatcactcgtaaaaatggcgaaagttgcatacttatgtcattaactgatgtcgaatctttgcaagaaacagcttatttgatgagatcaccaaccaacgcgaatcgtcttctggaatctacctctcagttaagaaccagaaaagggaagctcaaggaattggatttagactga

SEQ ID NO: 10593 - DNA, 333 bp, Photorhabdus luminescens
atgcgagcttatactccctttgctcaacctattgataagacgctttggcgtttcgcaggtctaccaggtaatcgaggacttgatctgactaatgtcctacagtctggtttgcctatagaagtctttgacagcattcacaaatggtcagatatgtctaaagccgacattatgcgtatcgccgggattaaggagcgaaacgttgcccgattaattcgtgtgtttgatgccgcagtacaactttttggcggaaataagaatgaagcatggacatggttaaaaaatcctgtgagggggcttggtgcagttactccaatgtctcttaattgcgactga

SEQ ID NO: 10594 - DNA, 7185 bp, Photorhabdus luminescens
atggggaaatcatcaaacaggagcgcggaatatttctttaccgggaattatttcgctgatgacaatgataatgacattgaggccattggatttgggggttacatttatgcctgcggaggaaatgaccatattacgctggggtcgattgccgccaaagtctataccggcacaggtaatgataccgtagttggtggtgcagcatatttatcggtcgaggattctaccggtaatctgaccgtaaaaggtggtgcgggttacgttgatattgataaagatggtgatggtgatatttcgttttttggcgctgcgggtggcgttgttatggatcataccggccatcacggtgatttggactttaccggcacggctatttataacgaaatgaaccgtgacggtttgacgggtaatatgatcttcgaaggttcgggcggttacaacaaattatggcacgaaaccaatcagggcaatttatactttaatggtgctggcgcgggtaacaaaatcgaccgcacttggtatgacaattacaatggaagccgtggcgatgtcacatttaatggcgcaggggctgcaaacagtattagctcgcggatagagagcggtgatattgttttcaatggggccggtgctgataatcacattatacgtagaggtaaagaaggtaatattatcttgcatggtgcaggggcattgaaccgaattaagcgtattcgccaaaaagaagatatttatgcgcagactcgtggtgatatttcctttgaaggtctagggggttataacaaaatttattctgatgttgcacacggtaatattcatttctccggtgccggtgcttacaacgaaatatctagaataggtatgaatgacgattttcgtgatgaggcgctggaatatactcaagttcaagatatcatattaactacagcaacgatgggtggaagttggattcaaaaaaaccagcaagtgacaggcattaaatcaacgactgagcctgatacttatctctttgcgtttgttgacgaaatgtatacaaaaatcagcaaaattcagctccaaaatgatcccgaaaccggtaagctcaattattacgccacctcttggtataaggaaggtaattaccttaatggtctcgcttcaacggaaatttcttctggtaatggctttgtcaataccaataccaacgatgcttatcgtctttttaatttaatgattgaacatcaccaaccgatcactattcatgcggttggagagggtttgtctgaaaacgagtgggttatttgtgctggcggggtaatagtcagggcggaagatattaccctctttgaggcaaagatgggagggtatgcgatcttttctgatcgtcagaaagttgatgttgccgcgatgagatcgaatcgtcaaccaaatacgtatgtgtatgccaagtatctggaatcatgcactaaagtagtggtagttaaattggaaaatgatcctgttacgcaggaacttaaatattttgccagcgcgtggtacaaagcgggtgatcataccggtaatttggcaaatgaagatatttcgctggcgaacggttatcgcgctataaatgcgggtggctgcacactaagtcaactgcaatatagtcttaatacaacaatacgtcgtgcttctgatcgattagcgcataccgaagagtatcgtcagcaagaacttgtgaactcatttgcccgtaatggtgagagctccggtgatattcaatttagtggcgctggcggtggaaatattattatatccagcgtcacgcaaggcaatgttaattttaacggtgctggtgctgctaacgtccttgttcatcagagtcagcgtggagaaatggatgttaatgccggaggggtggcaaatgttgtggtgcgggttggggatggacgatttctggctcatcttttggcagtgggtaatatctcgatccataaaggtaatggtaatagccgggtggtgatgctaggtggctacaatacgcacacgcagataggcaagggtagagcgagctggttaggtgccggtggttttaatgtcatgacccaaaaaggcagtggccgtgtttcctcggtattggtgggtggtgccaatgtcctgactaagcttggtgccggtgatttggtttccggtatgctcggtggcgctaacgttatcacgcatatcactgatgatgccgaaatgtcgaatacccgggcaattgcattgggtggggctaatgttcttaccaggaaagggcatggtgatgtactagcagtcatgggcggcggcgcaaacgttctgactcatattggtaacgggaatacgacaggtgtgatgctcggtggtgccaatatcctgaccaaaataggagacggcgatactactggcactctgtttggggtaggtaatgtactgacccatgtcggtagcggccagactttggcggtgatgggggccgcaggcaatctcttgaccagagtcggggatggagttgtgattgccgccatgattggtgcaggcaacctatttactcatgttggtaaaggcgatatatgggcattgatggggggtgcagtaaacatctttactaaagtgggtgacggtaatgcgttggcactgatgatagccgcaggtaacgtgtttacgcatattggggatggtaccagtgttgccctgatgctggcaaaaggcaatgttgcgactaaagtgggtaatggtatgacgctggccgcaatgattggtggggccaatatctttacccatgtcgggaatggtaatacttttgtggctatgatcggtggggccaatgtgctgaccaaagtcggtaatgacctgaccgccgccttaatggtagggaaagccaatatctattcgcatgtgggcaatggcaccagtatcggtttgtttgccggtgaactgaacgtgatgacgaaagtcggtgatggtacaacgttggcggccatgtttggtcaggctaatatcatgacccatgttggcaatggcttaaccggtgttttggcattaggagaagcgaatgttgttaccaaaactggtaatgattttatgggggttgttgcgggggcgaaagcgaacgttattacgcatgtaggcaactcgatgactgctggcgtactgcttggcgaaggtaatattctgaccaaagtgggagaggggacaaccgtcggcttgctggtgtcgaatgtggggaatgtcatgacccatgttggtcatggcacaacggtggggtttgccaaaggtaaagccaatatcatcacgaaggttggtaatggtaccggcgtaaatgcggtttggggtgaagcgaatatcctgacccaagtgggaagtggtgaccgttataacttcgcgaaaggtcaagcgaacatcataaccaaagtgggtgatggacaagaagtgacgatcgttcagggtgacgccaatattatcactcatgttggtcacggtaatgattacactggcgcttggggcaaagcgaatgtcattaccaaggtcggtgatgggcgtaatgtggtgttggctaaaggtaaggctaacattgtcactcaggtaggtaacggtgacagttttaatgccttatggagtgaaggcaatgttgtcaccaaagtgggtgatggcatgcaagtcaccgtggcaaaaggcaaagcgaatatcaccaccactgtgggaaatggcttaaatgtaacagcgacgcatggcgacctgaatgtgaataccaaagtgggtgagggtgtttccgttaacgtggcgtggggtaatttcaatgttaatactgaggttggtaatggcctgaatgttgcggtgatgaaaggtaaaaataacaccaatattcatattggtgatggtctggggatgaatgcctcttatgcacacaataatgtggcgattaagattggcaacggtgatttctatagtttctctgttgcagaaagcaatacgcaaagcaacagactctcttccttctttgaacagatcaagcagacagcgttaggtgtagggggcagtcaggcgatcaactatctggttcagggcggtgaggctaatacgtctgggatgcacaaaggcagaggggcgattcatttagccgaagtttctgctattgatggttttaagatagatgaaattgcgccggtaagttcagatttaagcggtcgtttgagaggttctgtaacagcggtcgaaacgcctgagctcggaagtatccatgattcattgaatattaacgaaagcaatgctccggggcaggaagccaatctgatcatcaatggtaattttgaacaagttaattatggctggctgacaactaatggtattgaagcatctcactcagccggtacttatggtcttgataacaaggggcatggagaacgcgtcagtgaacttgatgcggatgtgaacaccacgatttatcaggatttacaaaacttgttcgaaggagaagttatttcactgagctttgattttgccaatcgtcataatgcttatcttactaacaatggcatggatgttttctggaatggtgaacgggtattctcaacttctggagatgtcgctggatggcaaaacaaaacgttggcgctaacagcaaaaacgggtagtaaccgaatcgaatttaagggtacaggtttaaatgatggcgtaggttatattctcgataatattgttgcgaaatctgagagctcactacccgccaagtctgttatcgaacaggcgaaacaggataatgcggcgcaaaatgcgttaagtgataaagatagagctgaagaagatcgccgtctcttagaacaagaaaaagagcagcaactggcagcaattgcaggaatgcagactcaactggaatcaacagatcaggcagcgctaaacaccaatgggcaagcgcagcgtgatgcggtaaaagaagaatcacacgcagtaacagatgaactgctctccatgactcaaggtctggatgcactgaatgacgttgataattaccacggtaaatcaggtaaccaatggcgtaatcaatttgccgctggattattgaacaatgttcagagtcaatgggaacgcaccaaatctactacacaggaagagttatttaatgctcagcaaaatgttaccgataatcaacaacaagtaaaaaaagcgattgcgcaatcggaggctggtgtagcgaaaagtgagcagcatcgtattggtgtgcaacaagatgtcatagatgcttataaaagaataaatttgaaagcggtacagttacaacaacagcgagcagaaaaagccaaaaatgaggctaacgttgcctaccaagaggcggagaatcgaggcaaacaggatattgccgtggctgaggataaagtggttcaggcacagactaatgcaaaggaagcgaaacagagagacaatgctaaaccgcagcgagtgggtgcccttggcagtggtttgtctggagaggcttaccagtccacggctatagttgaaactagcagttatgttaaccccgagtttgttgtacaggcagatggacgattcagtgcaggattgatggaagaagatctggccgtactgaaagaggcaaaaaacaggattaatcagttgccggtcaataagctagcactgttggataaaaatctgctgacaacatcttctcaacatcgtggggcaatcaaaggggatgtgctacaaaaaattgataataagatcttcgaccttatcgcgaatgggaaagcgctggaggcttattcattccattttagccaggatggtaatgtgttggaaaaaatcagcaaaatcatcccggaaattggcagtgtgctcctgactaaaggggataccgctgagtctaaaaagttcatgcaaggattgtgttttgctttatctgcccgttacttaatggaagaacgtgtacagggttcagggggaggtaaagcttatatgttgtggttaaaagacacggtaaaagcctataacgacaaatcagtcaataagaaagccgatattaacgccattgaatcggctttgttgattcaatatcgccgtcaaaatattgggctggttattgaagatttattatcgatgcagtacagccagtctatggatagctctacccctgaagcttatagaaaagcgaatgctgcttatggcggcaaattgaaagctaatggattggccgggccgaatattaataatgcactgaattactctgttgaaggctatgaatccgtcatggataagttgcgtcatgtgagaaagtcgacttacatatcattcatgtctgaagaacatgccatgtccgttgtggtgcataaaaaacttaatcaaacagtttggtcattttatgatcctaattatggtggtaaatcgtttgctaactataacgatttccgccgttttatggatacgtttcataaagggtttataacgagttataaattccaggcaagtaaagagtctggccaaagcttttatattcactttaataagtttgaagagggaaccattgcgagatatgacggcgtttggaaaacgtcacgtgatggtgaacaaaactacgtattgcgtgcattgaaagagcaaggcacggtatttaacttaggttcaaacgtcactgggcgtgtcattgattaccggaaaggtgatatcaccttggaagtaacggctaagcaaggtaaacaaacgaagaaggttctggttgacgttgagagcaataactttaagcaagctgccagctttgtgcagtcgaatatcaataaagtcctctcttatccggcagcaaaccggctgatactgaaagtgccggttgagggggatgcggcaagccccttactggaaaaatggtcatcaagtgacgcgatcaaaaataaaaatgcagaggcgtgggagcaggtaaccgtcaccccacaaaccgatgatcgtacaactcgttttagtcatcaggtcattattcaaatggaggatgacccggtcgttgccaaagccgccgccaatctggccggtaaacacccagattccagtgtggttgtacaactcgatgctgacggtaaatatcgtgtcgtttatggcgactctgccagattatccggtaagttaacccgaattctggataagaaattgacgagaagcctgttccaggagcaaagttttggtgtgcaccaaaaacagctccgaggggggaacaggctatggacaacttag

SEQ ID NO: 10595 - DNA, 885 bp, Photorhabdus luminescens; identical to SEQ ID NO: 7045

SEQ ID NO: 10596 - DNA, 2967 bp, Photorhabdus luminescens
gtgagactaaagcagttcagtcacgatcttaaaccggtgggcaaacttgaccatatcagcctcgtggggtgttctttgatcagtgatgataagcgggacggttttgctcgtcgctttatcacagcgttagataagcaaggtattcgcagtcatgtttctgcccgccgtagcgaagtcgcgattgatgcaacaggccgtaaattgacccgtgatgcaaacaaccaatgggttaataacttgcctgataacaaaattgtattcgaatggaataaacagggtgaattgacgccccgtacagaaagggtgattcgcggaattactgaaagtgacatcacccttgccaaagtgggatataccggtgctgatgtggtgacgagaggggcagttgcagattatcgttatccttttactgcgccaaagaaacgtgaaaataccattcagattgacgccaataataaatcgaataatcagcttagctactccggcaacattcaggttaatgtgggtgaaggggagtttactgcgctcaattggggaacatcaaatgtcggtattaaagtgggtaacggaggctttaaatcgctggccttcggtgacaataatgtgatggttcatctcggtgacggagatagcaaacacagcttcgatatcaggggttatcaggcgcttgaaggggcgcagatgtttattggtaatcgtaatgtcagcttcaatcagggcagcagtaatgacctgattgtgatgatggataaatccatgccaacgccgccgttggttaatccatttgatggcgtgatgcatgtcaccggagtactacaaagtattgctcactttggcgaagaacgggatgggttaatcgcgcaagatcagcaatggacactcaccggtgcgagcaaatttgtacgggatatgtccggtttggatcaaaccagcagtgtgaactacaaaacgctggttgagctggatttacagcatgaacgtagtagccgcggtgtgaagcgagatattgaaaccacattgaataaaaaatatcaccaatggctaacctgcaatgtgactgatatgggcacaatgagccgcgcaaatagattccgtcaggctaatgagaagttggcttttaactttgccgtcggggggcagggggcagatattcaggtaacagccggtaactggaattttatgttcggtgaccatatccagtcgattctggataccaacctgggttcgttgtttggcctgatgacgcagcaatattcggcaacgggtatggtgaagactacgtttacctatcatccgcaagatttgccgcgtcagcttaagaacaaattgcttggccggttagccagtgtaaacgaggagacgactttagcggacatttttggcgtcaattataccgcagagggacaaatggtttcctgtacaggagaaccggttgatggcgaagcgattctgcgagaaatgctggccgtgattgcagagtttagtggggatcaactgaaagcgtttacaaatccgaagaagttgcttgatggtttgaaagcgggtatggatatgggggcggatggcatcagatcatttgcagaaagtcatggcctgcaagggaaagcgcctgacgaaaaccatacaccggaatctccagtgagtgtcgatggaaagcgtgctcaggccgatgataaagcaaaacctgcatttggctttaactcactgaatttgcctaatctgtttgcaacgatgttcagtaaagataagcagacagaaatgcactccttagtcacgcatctgaaagagaacttgacggctgatttgcttaatatggaggaaaaaacgtttgatttcctgcgtaacagcggccatttgcatgatgatggcgatatccatatctcgttggggaactataacttcaactgggggggtgacggtaaagatcttggtgcttatctgggcgataacaacaacttctggggtggtcgcggtgatgatgtttattattcaattggtacttccaacctctttacaggcggtgaaggagatgatctgggcgtcctgatgggacgtgaaaactggatgtttggcggtcatggcgatgataccgcagtggtggctgggcgaattaaccatgtatttatgggtgaaggcaatgaccaggcatttgtttttggcgaaggtggttttattgaggcgggtaacggacaggattacgtcgtcgcttccggcaactataaccgggtggatagcggtgaaggtcaggattatgttgtcaccatcggcaataataaccagattgagttaggtgaaggcaatgattttgccagagtatttggtaatgacaaccggatcgacggctatttcggcaatgatgcgataaaactgatgggctaccatgcggtaattaacggtggagaaggtgatgatcatctgatagccgcagcgatttcgaagttcagtgagtttaatggcggtgatggtcaggatctgctggtgctgggtgggtatcagaaccgcttccacggtggttcgggggcagacagttttatggttagcggagaggtgattgatacatcggtcaatgatatcagcgcagaagacatgatattgcttaataacgttgactggcgaaacctatggttgcagcgcagcggatatgatctggtgttgtcggtgaagcgccaaactcgggacaacgatgctcagggggtgtttgagtcagtaggttcggtgacatttgataattactttaatggcaatcgtgccaaattggtgactcagataggtgataagaacgcattagggaagcgtgaatttactgcactgtcagataatgtggtggattctttgatccaggcaatgagtagttttgctccgacagtcggtgataatggttttattgaggggctggagagtcaagcgaaagtggctattacaacggcatggaccgatgtcacgattggcaaagggaaatttgcctaa

SEQ ID NO: 10597 - DNA, 792 bp, Photorhabdus luminescens
atgaaattagtcaacccattaaactaccatatgcagataccggaaaatccgctctctcctatccctgtggtattaatccacgggttattcggtgatctcaataatcttggggttttggctcgtgatttgcagcaatactatcccgtcattcaagtcgatgtacgcaatcacggtttatctccacgggcaaataacatggattaccacgatatggcacaagatgttatttccctgctggatcatctgcaaattcagtccgccattattattggtcattcaatgggcggtaagatcgcgatggcaatgactgcactagcaccagagcggatagaaaaaattgttcttattgatatagcccccgttgcctatcaggttcaccgtcatgaccaaatttttaccgcactgaacaaagtgacagcagccggagttaaatcccgtcaagacgccgctaagattatgcgagaaaatattcaggaagaaggtgtcattcagtttttactgaaatcattccatcagggggaatggaaattcaatttaccggtattaattaaccagtatgaaaagatcatcggctggcaagaaatccctacatggcctcgccctgccctgtttattcgtggcggcctttcctcttatatccaggaagagtaccggaataatatcaccagacaatttccacaagccaaagcttgggttatcgccggttgcgatcactgggttcacgcagaaaaacccgacgcagtgttaaaggcaattcatcatttccttaatactaatacggaattaatgtag

SEQ ID NO: 10598 - DNA, 1254 bp, Photorhabdus luminescens
gtgaagaaaaatttactaaagagtctttattttcaagttttgctcgcaataactatcggtatacttctgggtcatttctatccggagcttggtacagaaatgaagccattgggtgatggatttgttaaattaatcaaaatggttattgctcctgttattttctgtactgttgtaactggcattgcaggtatggaaagtatgaaagctgttggtaaaacgggcgctattgcactggtgtattttgaaatagttagcacaattgctttgattattgggctaattgttgtcaatgttatgcagcctggtgcagggatgaatattgatccctctacgttagatgttaaagcggtatccctatatgcggagaaggctgctgaacaagggataatagcatttttacttgatgttattccggccagtgtcatcggggcatttgccagtggtaatattttgcaggtcttattatttgctgtgttatttggttttgcacttcatcgtttaggagagaaagggaaaccaatcttcaatattattgatggtttttcgcatgtcattttcggtattatcaatatgataatgcgattggctcctttaggtgcttttggtgcaatggcatttaccatcggtaaatatggtattggtacgttggtacaattaggacaattaatagtttgcttttatatcacctgtattctttttgttatatttgttttagggacaattgcaaaagcgacaggatttagtatattccggtttattaattacattaaagaagagttattaattgtattgggaacatcatcttctgaatctgcattaccgcgtatgttagataaaatggagaaagcgggatgccagaaatctgttgttggattggtaataccgacgggatactcttttaatctggatggcacctctatttacctgacaatggctgcggtatttattgctcaagcaacaaatactcatatggatattgtgcatcaaataacgctattggttgtattacttttatcttctaaaggtgctgctggcgtaacaggtagtgggtttattgtattagctgcgacaatttctgctgttgggcatttaccactagctgggctggcattaatcttgggaatagatcgtttcatgtcagaagcaagagctttaacaaatctgattggcaatggtgttgcaacgattgtggtcgcgaaacgttgtcgtcagcttgatgaaggcaaattaaacgaagtgttaaatgccaaataa

SEQ ID NO: 10599 - DNA, 255 bp, Photorhabdus luminescens
ttgatgtcatgcgagtctgtcatttttgaaatggagaaaatgcagaatcttgttaaacagaaggatagtgaattgaatggacaaatagcgaaaaattcagccttgggtgtcactggagtgtttttgctgattccgcttttcttcatagatactagcgatgcaaaaacggtagaaggaaaggcagcaaaagataggtacgaaaaactacagcaaatctatcgtgataaaagctgtgcagagaaagaaaaaaagtaa

SEQ ID NO: 10600 - DNA, 753 bp, Photorhabdus luminescens
atgaagtatcgtttgggcggaatcgctcttgccgccgcattactagtgggatgcgctaattcatctgatactgttgaacaggagcgttcagacctattggaaggttttaaccgtacaatgttcaactttaattatgatgttcttgacccttatgttttacgtccagtcgcggtagcgtggcgcgattatgtgccgatgcctgctcgaaatggtttgggtaattttctgagtaatctcgaagagccggctagtatggtgaacagttttttgcgcggtaacccatatcagggaatgaaacattttaaccgttttttcctaaataccatcttgggtatgggggggctgattgatgttgcaacgatggcaaaccccaaattggcaaaagaagagccaaaacgctttgggagtactttgggctatcataaggtggggtatggcccttatgttgtattaccgggctatggcaattttaccctacgtgatgaagggggtaactgggcggatatgacttatccaatgctgagttatctgactatttggatgtcagccggaaagtgggcatttgaagggattgaaacccgtgctcgtttactggattctgatggcttgttgaagaactcgtcagatccttatttgatgatgcgtgaggcttacttccagagtcatgattttatggcaagcggcggtaaactgaaagccacggaaaatccaaatgctgaagcattacagggtgatttggatagcattgattga

SEQ ID NO: 10601 - DNA, 1344 bp, Photorhabdus luminescens
ttggttatgaaccagaaaaacctgttcacccgttcagcattagcggttgcagtggcaataatttcatcgaatgctggcgctgctggtttccagttaaatgaattttctacttcggctttgggccgcgctttttccggggaaggcgttgttgctgataacgcagcggtaggaagccgtaacccagcagcaatgacactgtttgatcgcccatcattctctattggcgccgtctatatcaacccagatgttgatattaccggtaaatccccagtaacaggcaaaagtactaacgctaaaaatattgctcctaccgcttggatacctaacatacatttcattatgccaatcgatgatcaatggtttgttggtacctcggtcaccaccaatttcggcctggcaaccgattttagcaataactatgaagcaggccctatcggcggtaaaactgacctgacaacgttgaacttcaatctgagcggagcttatcgcctgaacgatcactttagctttggtttaggactgaacgctgtttatgcggatgcaaaaattgtccgtcatgcgggcgctctgtcatacatgctggatcagcaccccaagatgccaaaaggtctcgtaaaaccaacagatgaggttgctaatctggaaggtaaagattggggctatggctggaacgcaggcattatgtatgaagtggatgaaaataaccgttacagcctgacttaccgctctaaagttaaaattaagtttaaagacggtgactataaaaatgacgtacctgttcagctaggtcaaatgctgcaaaaagcgggagtgaatttacctgctactggaggccaaaccattggcggtagattggatctcaatttgccagatatctgggaggtttccggttacaaccgcgtagcacctaaatgggctattcactatagcttggcatatgcaggctggagtgaatttaatgaactgaaagggaccagaaaaaaagacggtgcagttttgtttagtaaacatgaaggcttcaaagatgcctaccgtattgctttaggtacaacgtattatcacgatgacaattggacattccgtacaggtatcgcctttgacgatagcccgattcctgctgaaaaccgttctatctccattccagatcaagatcgtttctggttgagtgcaggtgcaacctacgcatttaacaaagatgcttccgttgatgtaggcgtttcatatatgcatggtcagaaagtcactgttaaagagaaattgtctgaagcgttacctaacgcatacgaattcgaagctaagggttctgcctggttgtatggtgtgaacttcaactacgcattctaa

SEQ ID NO: 10602 - DNA, 1311 bp, Photorhabdus luminescens
atgagtcgtccgttaacaaaagtgacacagcaaggtgatcgtatcgccattgtcagtgggctacgcattccatttgctaaacaggcaacatcgtatcacgacataccggctgtggatttgggtaaatcagtcgtcagtgaacttgtgactaggagtggtttactccctgaaaagattgaccaactggtgtttgggcaagtagtacaaatgcctgaagcgccgaatattgcccgtgaaattgttctcggtgctgggttaagtgtgagtactgatgcttacagtgtatcccgtgcatgtgctactagtttccaggcgattgccaatgtggctgaaagcattatggctggcacggtgaatattgggattgctggtggagcagattcctcatctgtattgccgattggtgtgactaaatccttggctcgtactctggtggagatgaataaggctaaaacgctatcgcaacgccttaagttacttagccgccttaaatttcgcgatttattgcctgtatccccggcggtagcggaatattcgacaggtctgcgtatgggagataccgcagaacagatggcgaagacttaccgtatcagtcgagaagaccaggatgcattagcacatcgctcccatattctggcagcaaaagcttgggaacaggggttgttggttgatgaagtcatgacagctcatttccctccataccgtgaagcattgcttgaagataataatattcgtaaaaattctgtactgacctcttatgcgaagctgcgtccggcatttgaccgtaagtatggcacggtcactgctgcaaacagtacaccactgacagatggtgctgcggcggtcatattgatgcgtgaatcagtggctaaggcgttgggaacaaaaccgcttggttatctgcgtagctatgcgttctcggccattgatgtctggcaagatatgttattagggccgtcatacgccacgccaatagcgctcgatcgtgcaggtattacactgaaagatctaactttgattgatatgcatgaagcttttgcggctcagacactggcaaacctgaaaatgtttgccagtgatgaatttgctcgtaataaattagggcgtgctcaggcaattggtgaagtcgatatggacaaatttaatgtcttagggggttcaatcgcttatgggcacccatttgcagcaacaggagctcgtatggtgacgcaggtattgaatgagttgcgtcgccgtggcggtggccttgggctgacaaccgcttgtgctgctggcgggttgggcacagctatggtattggaggtggaataa

SEQ ID NO: 10603 - DNA, 2232 bp, Photorhabdus luminescens
ttgtgctgctggcgggttgggcacagctatggtattggaggtggaataatgactcaagctcagcatgatgctgcacccatcactacgggtacaaaccaaactgcttctgttttcagttttgacgtcaggccagataagataggcatcatcaccattaatgtaccgggagaaaaggtcaatacgctgaaagcagaatttgttgatcaatttctgaatgttttcaagcaagctcagcaatcttctggtcttaaaggattaatattgatttccggtaaaccggatacgtttattgccggtgctgatatttctatgattgccggatgtaagaccaaagaagatgcgcgagatttggctgaaaaaggtcagaaactattttctcagatagccaattaccctttgcctgtcgtagcagcaattcatggcgcttgtttggggggcggtttggaattggcgcttgcatgtcattggcgtgtatgttcacaggatgataaaactcgtcttggattaccggaagttcaacttgggttattacctggctctggtggtactcagcggttgccaaggcttattggtgttagttcagcgttggatatcatgctgacaggtaaacagctacgggcgaaacaggcattacggctcggattggtggatgatgctgtgccgttggatattttgctggatattgctatcgaaaaagtcaaaaagggtattcctgtgcgtaagcctttgccgtggcaacagcggctattagttggccccgtcggaagatactttttgtttaatatcgttcgtaaaaagacactggcgaaaactcgtggacattatcctgcacctgaacgaattattgaagttgtcaaagaaggtcttgaaaaaggtatgagccagggtttacgggctgaggcggtggcatttggtgaattggcaatgacacgggaatctgctgctttacgtaatctgttttttgctgcaacttcgttgaagaatgaaacggggtcatcagagaagccggcgaagatcaagcacgttggtatattaggtggtggtttgatgggtggaggcattgccaatgtaacagccacccgaggcaaactaccggtgcggattaaagatattaatgaaaagggcattagtcaggtattgaaatatacttgggatttgttgtccaagcgggtgaagcaaaaacgactacgcccggcagagcgtgctcaacaaatgatgctgatttcaggaacgacggattatcgtggtttcgcacaaactgatattgttgttgaagcagtgtttgaggatttgtcactaaagcagaaaatggtggcagaaattgaaacgaatgctaaaccagaaaccatatttgcatctaatacctcttcactacctatccatcagattgctgaaaaagctcaacgaccagagcaggttattggtctgcattattttagtccagtggataagatgccgctggtggaagttattccacatcaagggaccagtgagaaaacgattgctacagccgtttctttggcgaagaagcagggtaaaaccgcgatcgtggtgggtgataaagccgggttttatgtaaaccggattcttgttccttatatcagtgaagccgcgcattgcttggtagcaggagaacctattgaccatatcgatggagctctggttaattttggttttccggtagggccgattaatttattggatgaagtaggtattgacgttggcaccaaaatcatgccagttctggtagaacaattaggcccgcgttttgctgcacctgaatctctcgatgctgtactgaaagatggtcgtaagggtaggaaaaatggccgtggtttctatttatatgccccagggcccagaaaattctggcagtttggtaagagagacaaaaaagttgatagctcagtgtataccttgctgaatataacgcctgagtcgcatatgctctcgtcagaaattgctcaacgttgtgtgatgctaatgcttaatgaagctgttcgttgcttggatgaaggcattatcagaagtccacgtgatggtgatattggggcggtatttggcattggttttccgccattctttggtggtccattccgttatattgatagccttggttgtgccagagtggtggagattctgcgcaggctggaaagccagtatggagacagatttgtaccttgtgagtgtttagtgaatatggctgaacagaataaaagtttttatccatag

SEQ ID NO: 10604 - DNA, 483 bp, Photorhabdus luminescens
atgcaaatttttattatgcgtcatggtgacgcggctttagaggcaattagcgatgctgcccggcaactcactcctcgcggttgtgatgaatcgcaaaaaatggcttgttggttagcacagcaaaagcatcagattgatctcgtattggtgagtccttatattcgcgctgaacaaacgttacagattgttcgtaaatccttatctttgccggatggtgaagaggtgttgttggggttaacgccgtcaggtgatgcgactacagtgagtagttatctccagtttcttgctgagcaaggtcataacgctattttagtggtctctcacttaccattagtcagctacttagttgctgagctatgtccggcagaaacaccaccgatgtttgcaacttctgcaatgatatgcgtggatttaaacagccagactggcaaagggactcttgtctggcaggtcagcccgtctcaattggcagcaaaagcctaa

SEQ ID NO: 10605 - DNA, 537 bp, Photorhabdus luminescens
atgatgaaaaataaatactccctgaatgaggaagagattcacttatttcaacaatcggtagcaggcactaaacgcatcaaccaagataccgtcttacattctcccagaagaaaaaaaaccagctatattgcccctgaacgaattcagcaagagcaaattgatgccagctactatttttctgatgaatttcaacccaaccttgatagtgagggccctacccgttacgtaaggggagatacaaaccattatgaattgaagaaattacgtcgaggtgactattcgccagaactgtttcttgatttacacggattaactcaaatgcaagccaaacaggaaattggagccttgatcgctgcttgccgtcgtgaacatgtctattgtgcctgcatcatgcacggccacggaaaacacattctcaaacagcaaacacctctgtggttagcccaacacccagatatcatagccttccatcaagcgccaaaggaatggggaggtaacgccgcactattgatacttatcgaacttgatgagccttga

SEQ ID NO: 10606 - DNA, 1248 bp, Photorhabdus luminescens
atggtaatagaactgcgtgatactgatatcatctggcgtaatgcaagactggcaacaatggatcctgctgtcaatgcagcttacggattattaaaagaatatgatcttgtcgtgcgtgatgacaaaattttagctattttgcccaccgcagcattacagacgagtcgttgtcaggtcattgatgttcaacaacgcttaattacccctggtttaatcgattgtcacacccatttagtgtttggtggtaaccgggcttatgagtgggaacagcgtttaaatggtatgtcctatgctgaacttagtgcccaaggaggggggattaatgcgacagtgtctgcgactcgggccagttctcatgaacaacttgagcgttctgcgcaacagcgtcttactgcatttatggccgaaggtgtgaccaccattgagattaaatcgggttatggattaaatctggaaaatgaagaaaagttgctacaggttgtgcagcacttagcgcaacataacccgatcgagatcagccctacattgcttgctgctcatacttgtccacctgaatataagcataatcccgatgcttatatggatctgatttgcgaagatatccttccacaactttggcaaaaagggctgtttgaggcagtagatgttttttgtgagagtgtaggatttaatctggcgcaaactgagcggctctttcaggcggcacagcgttggaacattccagtaaaaggtcatgtggagcagttatctcatttaggcgggagtgaactggtcgctcgctatcatggtctttctgtggatcatattgaatatttagatcaggcgggagttgagtcgctcagtcacagtggtacggtagctgttttgcttcctggtgcattctactttttgcaggaaacacggtgccctcctattgatttattgcggcaatttaatgtgccgatagccgtatctaccgattttaatcctggaaccagcccatttgcttctttgcgaatggccatgaatatggcatgtgttcaatttggattgactcctgaagaggtatggttaggtgtaacccgacatgcggctcgtgcattgggcagagaaccgcgtcacggacagttgcgcgcaggagcttacgccgattttgtggtctgggatgcagagaatcccgttgatattttctatgagttgggtcataaccctttgaataccagagtgtttcgtggtgttatgactcattccagcatatataacagataa

SEQ ID NO: 10607 - DNA, 957 bp, Photorhabdus luminescens
atgaatttatggcatgctacttcgccgactatttggcaaggacgaaatgatttggcagaagcggataatgcactacggctttttcaaacagttaaactatctccgtattttacgccggaagaattttctcactatgttgctctattagggtttgaatgtgatgaaggtgtgaagcgcaatcagggaaggcccggtgccaatcaaggtcctgattatttgcggcaatcgttggcaaatatggctagtcataaagggcatgataaattggtagatttgggaagcattcgtgctaatcccaatcaattgagtgaagcacaacaagctttgtctgatgccgttacccaatgtcaatgtcagaatgtacgtaccttggtattgggtggtggacatgaaacggcttttgctcatggtgttggaatttatgatgcttttccacatcaacgtgttggtattattaactttgatgctcatctcgatttacgtcggtcgccgcagcccacttccggtacaccatttcgtcagcttgctgaatattgtcagcaacatcaacgtctgtttcactatacttgcattggcgcaagtttggcgtctaatacgcaggcattggtggatgaagcaaatcgcttgaacgccacgattatatgggataatcaatgtcgtgaaactatgctggacaaggtacaacagcagatacaagatatactccagcaagttgatttgatttacatgacgatcgatttggatgtattacctgcttatcagatgccggcagtctctgcgccagccgcattggggctgccattggagcgccttctgcaattaattcagccaatttgtcagagcggtaaactacaggcggctgatttggttgagctcaatccactatttgatatacaaggtataggtggaagagcagcagcacgtcttgcctggcaattagcacattggtggtattga

SEQ ID NO: 10608 - DNA, 732 bp, Photorhabdus luminescens
gtgacgactcactcatcaggatcatttgccaaacctgtgcctctgtatgccaaagtgaaacaatccatcattgaaaaaatctacactggtgaatggaaatcaaatgatcgtgttccttctgaagctgaattggttaaacagtttaactgtagccgtatgactgctaaccgtgcactgcgtgagttgaccgctgaagggctattagtacggctgcaaggcgtgggatcgtttgtcgctgaaccgaaggggcaatccgctctgtttgaaattcacagcattgctgatgagatttcagctcgttctcatcagcatcgctgtaaaatattaaaattatccgagctggatgcggatgtgaaacaggccgctgaattggacattattgttggtacgccgatttatcattcggttattgtccattatgaaaacgatgttcctgttcaaatagaagatcgttatgtcaatgctcaagcggtgcctgattatttgcaacaggattttacgaaacttacgccacacgattatttgtcaatgattgcacctctaacggaaggtgaacacattgtggaagcgattgctggtgatcctcgatcctgcaagttgttgcaaattgagtcaggggctccttgtttattaattagtcgccgaacttggtcgattcattacattgtttccagtgccagtctgttatttcccggtaatcggtataaattgaaagggcgtttcaactcatag

SEQ ID NO: 10609 - DNA, 183 bp, Photorhabdus luminescens
gtgaaaaaatatgtacaggaacatgggctaaatttggaaaaatgtgttgcctatggtgattctggctctgacatccccttatttaatgcgcttaccaatacggttgccataaatgggacggataaaatacgggaaatcgcattaatccattatgaaggtaataatctatggcaaccctattag

SEQ ID NO: 10610 - DNA, 1680 bp, Photorhabdus luminescens
gtgaccgcccaaaatagtaaattccgtagtgtcggtatccgggcacccagaggaacacaattaacagccaaaagttggctaaccgaagctcctctgcgcatgttaatgaataatcttgatccagaagttgctgaaaactcttatgaactggtggtgtatggtggtattggtcgggctgctagaaattgggagtgttatgacaagattattgaaacactgaaagagttggaagatgatgaaacgttgttaatccaatcgggtaagcctgttggggtatttaaaacccatagcaatgccccacgggtactcattgcaaattcgaatttggtgccgcactgggcgacttgggaacacttcaacgagctggatgctaaagggctggcgatgtacggccaaatgacggcgggtagctggatttacattggcagccaaggaattgttcaaggcacctatgaaacgtttgtggaagctggtcgccagcattataacggtaatttacagggccgttgggtgttaactgcgggtttaggcggtatggggggagcacaaccactggctgcaacactggctggagcgtgttcgctaaatattgagtgtcagcaaagcaggattgatttccgcctgcgtactggttatgtcgatgaacaagcgaaagatctggatgacgccctgactcggatcgaaaaatacactcaggaaggtaaagccatctctattgcactgtgcggcaatgccgctgaaattttgccagaattagttcgtcgtggcgtacgcccggatttggtcactgatcagacaagtgcacacgatcctctcaatggctatctaccgaaaaactggagttgggaagaataccgccaacgtgctatttcagcaccggaagaggtcatcaaagcagcaaaatcctcaatggtggaacatgttaaggcgatgctgattttccagcagcagggcattcctgtttttgattacggcaacaacattcgccaaatggcatatgaagttggcgtagaaaatgctttcgattttcctggttttgttcctacgtatattcgcccgttattttgccggggtatcgggcccttccgctgggtagcgctttccggtgatccacaggatatctataaaactgacgccaaagttaaagaattactccccgatgatcaacatttgcatcattggctagatatggcgagggagcgcatcagctttcaggggctacctgcccgtatctgttgggttggtttagggcaacgagccaagctagggttagcttttaacgaaatggtacgcagcggtgaactttcggcaccgattgttattggtcgtgaccatctggattccggctctgtagccagtccgaaccgcgaaaccgaatccatgtgtgatggctctgatgccgtttcggactggccgttgttaaacgccttacttaacaccgccagcggtgctacttgggtttctctgcatcatggcggtggtgtcggcatgggtttctcacaacatgccggtatggtgattgtttgtgatggaactgatgaagccgcagaacgtatagcacgggtgctgcataacgatccggctactggggttatgcgtcatgctgatgcaggttatgaaattgctatccattgtgctaaagagcaaggattagacttgccgatgcttaatacaaaataa

SEQ ID NO: 10611 - DNA, 1545 bp, Photorhabdus luminescens
atgaagcaactaactatttatccaggaaaattgacccttgatgaactacgtcaggtttatctacaaccagtaaaaatcactctggatagccagatttttcctgctattgaacgcagcgtagagtgtgttaatgcgattcttgctgaaaatcgcactgcctatgggattaataccgggttcgggctattagccagtacacggattgaagaagataatttagaaaaattacagcgctcgcttgtcgtctctcatgctgccggggtcggcaaagcgttggacgataatatgacccggttgatcatggtattgaaaattaacagtctctcccgtggttactcaggtattcgtctcgctgttattcaggcattaatcgcgttagttaatgcggaaatttatcctcatattccctgtaaaggatcggtgggggcttctggtgatttagcaccgttggcacatatgagcttgttattacttggggaaggacaagcgcgttatcagggcgaatggctgccagccaaagaagcgctggcaaaggccaatttacaacctattacattagcggctaaagaaggtttggcgttgctcaatggaactcaagtatccactgcttttgcgttacgtgggttatttgaggcagaagatctgttggcggcagcgatagtttgtggttctttatccgtagaggcggcattgggttcccgcaaaccatttgatgcccgtgtacatgtggtacgggggcaacaggggcagatcgatgttgccgcattgtatcgtcatgtattagaggagagcagcgagctatcagattctcacatcaattgccccaaggtacaggacccttattcattacgttgtcagccacaagtcatgggcgcttgcctgactcagttgcgccatgctgcggatgttattctgactgaagctaatgccgtatctgataacccattggtgtttgctgagcagggagaagtgatttccggtggtaacttccatgctgaacctgttgcaatggcgtctgataatttggctctggtattggcagagataggggcattgtcagaacgacgtattgcgttgttgatggattcacatatgtcacagcttccgccttttctggttgagaatggtggtgtgaattcaggttttatgattgcacaagtgacggcagcggcgcttgccagcgaaaataaagcattggcacacccggcgagtgttgacagtttaccaacttcggccaatcaggaagatcatgtatcaatggcaccggctgcgggacgtcgtttatgggagatggcagaaaatacccgaggtattctggcaattgaatggttatctgcctgccaggggatcgatttccgcaatggtctgaaaagcagcccgattttggaagaagcgcgtgttatcttgcgagcaaaagtagattattacgatcaggatcgtttttttgcacctgatattgatgctgctgtgaaattattagccgagcaacatctctcctcattacttccttctggacagatattacagcgtaagaataaccgttaa

SEQ ID NO: 10612 - DNA, 1395 bp, Photorhabdus luminescens
atgcaagcttcattacaactagagcgaggactcaacgcacgccatatccggtttatggcgttgggctctgcgattggtacgggtcttttttatggttctgctgaagcaataaacatggccggtccggcggtattattagcttatttagtgggcggtgctgctgtctttatggtgatgcgtgctttaggggaaatggcagtccacagaccggatgccggctctttcgccagttatgctcatcaatatttaggcccgttacccggatttattactggctggacctatactttcgaaatgatcatcgtttgtctggcggatgtgactgcttttggcatttatatggggctatggtacccggaagtgccgcgttggatatgggtactgagcattattttcattattggcgcgctcaatctttgtaaagtcaaagtatttggcgaaatggaattctggttatcgattctgaaagttgctgcaatcagcgccatgattattgccggaaccggtattattctgtttggttttagcggtcattttcaggcaacgggagttcagaatctgtggcaacacggcgggtttatgccgaatgggctggggggcattattgagtctctggctgttgtgatgtttgcttttggtggcattgaaatcattggtattacatccagcgaagctaaaaatccggcgaaagtgatcccgcaagcgattaactctattccgtttcgcattcttctgttttatgtactcactatttttgtattaatggcgatttacccttggaatagtatcggccaagaaggtagcccatttgtcgcaatatttcaggggctaggcattggttcggcggcgaatattctgaatattgtcgtcattacggcggcaatttcggccattaacagcgatatctttggtgcgggtcgtatgatgtacggtatggccgagaaaggattagcccataaaaaatttatgcatttaagccgtaatggcgtgccttgggtgacgattatggttatgaccttggcgttattgtgtgctgtggttctcaattatttgctccctaaacaggtatttgtcattgttgcttcaattgcgacttttgccaccgtgtgggtctggttaatgattttgctatctcaatttgctatgcgcagaaaaatgtcaccgggagaagcacaaaaattacaattcccagtaccgatgtggcctgttgcgccgattttaaccatcgtgtttatgatatttattattgctgttctcagttacttccctgcgacacgaattgcattctatgtgggaggcgcatggatcgcgctgttaacatccgcctattatttatggatacgaaaaaatgtcattattgtgagcgctcaatcagccaaagaaacacggtgttaa

SEQ ID NO: 10613 - DNA, 945 bp, Photorhabdus luminescens
ctggaggcgcttttggacaagatttttatcgatgaggcagtagctgagttatataccattcaggatatgttgcgctggtctgttagccggtttaatgcggcgaatatttattacgggcacggtacagacaatccttgggatgaggcactgcaactggttcttccatcgctgtttctgccgctggatatcccacaagagatgctgactacgcgactgacatccactgaacgtcatcgtattgttgaacgggtattgcgccgtattaatgagcgtattccagttgcttatttgactaatagagcttggttttgtggtcatgaattttatgttgatgagcgggttttggttccgcgttcaccgattggtgaattaattaataatgaatttgcaggattgatccctgagcagcctgccaatattctcgatctctgcacaggtagtggttgtattgccattgcttgtgcatatgctttcccggaagcagaaatagatgcagtggatatttccgcagatgtgctggctgtgactgaacagaatattcagaatcacagccttgaccaccgggtcattccgattcgctctgatctgttccgcgatatgccaccggttaaatacgatcttattgtcaccaatccgccttatgtcgatgccgaggatatgagcgacttgccggaagagtttcgccgtgagcctgagttaggtttggcggcgggttcagatggtttgaaattggcacgtcgtattctggcaactgcgccaaattttctcaccgaacggggtgtattgatttgtgaggttggtaacagtatggtgcatttgattgaacaatatcctgatgtgccatttacttggttggaatttgaatatggtggtgatggcgtatttatgttgacgcgccaacagcttattgaacatcacgagcattttcgcttattcaaagattga

SEQ ID NO: 10614 - DNA, 1086 bp, Photorhabdus luminescens
atggcgggaaatagtatcgggcaatttttccgggtcaccacttttggcgaatctcacggtttggcgttgggatgtattgtcgatggtgtgccaccgggcattgcaatcacagaagctgatttgcaagttgatttagataggcgtcgtccgggaacttcccgttatacaacgcagcgccgtgagccggatcaggttcgcattctttctggtgtatttgaaggggtaaccactggcaccagtatcggtttactcattgaaaatactgaccagcgttctcaggattacagcgctattaaagatgtatttcgtccaggccatgccgattacacttatgagcagaaatacggtatccgcgactatcgtggtggtggtcgctcttctgctcgtgaaacggcaatgcgtgttgcggcaggtgcaatagcgaaaaaatatttgctggataaatatggtattcgtgtccgtgcttgcttgacccaaatgggtaatatccattgccaattgaaagattgggaactggtggaacaaaacccatttttcagtcctgatgaaactaagcttgaacaacttgatgccctgatgcgtgaactgaaaaaggcgggcgattctattggtgcgaaagtgaccgtggtcgcggaaaatgttcctgctggtttgggagaaccggttttcgaccgccttgatgctgatattgctcatgcgctgatgagtattaacgcagtaaaaggtgttgaaattggtgatggtttcggtgttatcaatttacgcggcagcgaaaacagagatgaaataactgctcggggattcaccagtaatcatgcgggaggaattctggggggtattagcagtagccagccaattgttgctcatattgcgttgaagccaacttctagcattatggtgcccggcaaaacgattaaccgtcagggtgaagaagtggaaatggtcactcgtggtcgccatgatccctgtgttggtatccgtgctgtaccgattgcagaagctatgatggcgattgtgctgatggatcacctattacgccagcgggcgcagtgtgctgatgtcgaatccagccttcctcgctggtga

SEQ ID NO: 10615 - DNA, 804 bp, Photorhabdus luminescens
atggactggttattgtcattaggtgcggaagtttacgttctgctctttctggttgcagtaatggctgggtttattgactcgatttctggtggtggtggtctattgaccatccctgcgctgttatccgttggtgtctctccggtgcaagcgttggcgaccaacaagttgcaggcagtgggaggctctttctctgccagtctctattttgttcgttacggtgaggttgatatcaaatctcaacgttttgccatactgatgacattacttggctcaatggctggtgcgattattgtccagtttataaagccagattttctctgtcagctattaccggttctggtcattatcattggtctttatttccttttgacgccagccattggtatggaagatcgccatcgtcgcttgacgccggtggtcttcgccttgcttgttgggagtgggcttggtttatatgacggcatatttggccctggggttggctcattttatgcgttagcttatgttgtgttgtgcggctataacctggcgaaatccactgctcatgctaaagtactgaactttgcttctaatataggttcactggcgctttttatccttggcggtcaagttttgtgggtattgggccttgtgatgttggcagggcaggtgattggtgcgcggttgggcgcaagtttggttttgactcatgggcagaaattgattcgccctatgattgtcatcatctcctttttgatgagtattaagttactgaatgataatcacggcgatacgatccgtagctggctggcattttatttctga

SEQ ID NO: 10616 - DNA, 552 bp, Photorhabdus luminescens
atgataacgcataactatcaacaaattattgatatttttaatcgccgttttggtgacgaatacaacacgcatttggttaaaggtgataacgaacctatttacctgccggcagatgaagaggtcccctataaccggattgtgtttgctcatggtttctacgccagtgcattacatgaaattgctcattggtgcattgcgggtaaagaacgccgtaaactagtggattttggttactggtattgcccggatgggcgtgatgcacagaggcaaagtgaatttgaaaaagtagaaactaaaccacaagcacttgattggttgttttgtactgcggcaggttttccgtttaatgttagttgtgacaaccttgaaggggattttgaacctgacagattagcttttcagcgtaaagttcatgctcagatcatggattatttagcgcaggggatacctgcaagagcggagtgctttattcaggggttgcactcgttctacaatacgcccccattgaaagcggaatattttccttatccggaagatatattcgcagaatga

SEQ ID NO: 10617 - DNA, 279 bp, Photorhabdus luminescens
atgctcgctgagtttgaaacgcgtattttagcgcaaattgatgacatggtagatcatgccagtgatgatgaattgtttgctggtggttatctccgcgggcatctcaccttagcagtagcagaattggagcaggaaggcgcacatacggctgaacagcttcatgaccgtgttgaagaaagtatccaaactgcaattaaagcgggagaattggcaccaccggatcaggttcttgtgcttaatacctggcagcgcctattggataatgctaaaactcaataa

SEQ ID NO: 10618 - DNA, 2043 bp, Photorhabdus luminescens
gtgaaaaattctgctatttgtaccgcaaccttaagttggaatgatcaaggtactccgatttcaacacagtttgatgacgtttacttctcaaatcaggatggactggaagaaacccgttatgtatttctcaacggtaactgcttcccccaacgattctgcacccattcccgttctagttgtgtaatcgcagaaaccggtttcggaacaggattaaattttctgacgctctggcaagcatttgatgcatttcgacagcaaaatcctgatgcgccattgaaacgtctacatttcatcagttttgaaaagtatccactgaaaaccaacgacttaaaagccgcgcatcaacgctggcctgagcttgagattttttcacagcaactttaccagcaatggcctcaaccactggcaggctgccaccggttgattatggcaaatggcgctgtcacattggatttatggtttggtgacgtcaatgatctattgccaacaatggattcaagtcttcacggcaaaatagatgcctggtttttagacggctttgcacctgccaaaaacccacaaatgtggagtgaacagttgtttactgcaatggcgcaatttgctcatccagaaggcacttttgcaacctttacttctgcgggtatcgtccgtcgtggtttacaacaggctggttttaatgtcagtaaaatcaaaggatttggccgtaaaagagaaatgctggccggagttctggcaactcagaagtatcaaccattaccagcaccttggtttgcccgtccgtcagcaagccacaacgatgatatcgctatcatcggcggcgggattgccggtattcttaccgcactcgcgctattgcgtcgtggagcacaggtgacgctttattgtcaggatgtagctccggcacaaggtgcgtctggtaatcgccaaggagcactttacccgctactgaacggtagtaataacggactcgaaaaattctttacctctgcatttacctttgcccgccgccaatatgagcagttctcagcgcagggaattgatttcgaccatcaatggtgtggtgtcagccagcttgcttatgatgaaaaaagtagcaagaaaattgagaaaatgctggcaacagaatggccgaatgaactcgccatcggcatgaattgtcaccagttgagtgaaaaatgtgggctggatattcatcaccacggcattcactatccacagggcggatggctatgcccggcagaactcactaaagcagcaacagagttggcacaacagcaaggcatgctctgttgcttcaatcatcaagttactgcgcttagccacaaccaacatggctggcaattgcatctcatgcatcaaggacaatcgttaaatgcacaacacaaaacggtggtgattgccaacggtcatcatctaccccagtttgaacaaaccgagaaactgccagtaactgctgtgcgtggtcaagtcagtcacattccaaccacaactgacttgagccaattgcaaaatgtgctttgctacgatggttatatgacaccggctaatccagccaatcaacaccactgtatcggcgccagttatcagcgtcatcggcttgataatgaatattctgaaacagaacaacaggaaaaccgtgaccggttgctgaaatgtttatctgatgccgaatgggtaaatcaggttgatgtttctgctaaacaatcccgtcaaggtattcgctgcgttatccgtgatcatatgccaatggtgggaaatgtgccggatctcaataaaataatgacagattatcaagatttaccagaaaaaatccgcacagggagccccattacagatgcaccctgttattccaatctatttgttatcggggcattaggttctcgtggattatgctctgcgccactcagtgcagaaattcttgccgggcagatctttgatgagccattaccactggataatgaaatactggcgacccttcacccaaaccgtttttggatcaaaaaactactgaaaggtcgtaaattgaaaattgaaaagccataa

SEQ ID NO: 10619 - DNA, 114 bp, Photorhabdus luminescens
ttgatgtaccacctgacagaagaaaagggtggaaaagtgttgagccttgcttgcggtgtgtacggttattggaagaagcaggggtcattattaccatcatttttgtgtgaataa

SEQ ID NO: 10620 - DNA, 1215 bp, Photorhabdus luminescens
atgaagcgcgtagtgatcactggcttgggtattgtctccagcattggtaataatcagaaagaagtactggcatctctgaaagaaggccgctccgggataactttttctgaaaaattcaaagagataggaatgagaagccatgtctggggtaatgtaaagctggatacctccggattaatagaccgaaaaattcagcgcttcatgagcgatgcctctgtttatgcttatctggcgatggaagaggcaattaaagattctggcctggctgatgatcaggtttctaatattcgtagcggattggtagtgggttctgggggtggttccccgcataaccaggttgcgggtgctgatgggatgcgtactcgtggtttgcgtggtgtggggccttatatggtaacccgctcaatggcttccggtgtgtcagcttgccttgcaactccctttaaaatcaaaggggtaaactactctatcagttctgcatgttctacttctgcccattgcataggtcatgcggctgaacttattcagttaggaaaacaggatattgtttttgctggtggtggtgaagaactctgctgggaaatgagttgtgaatttgatgcaatgggtgcactttcaacgaaatacaacgaaatgccagaaaaggcgtcccgtacttacgataagagccgtgatggttttgttattgctggtggcggcggtattgttgttgtggaagaattagagcatgcattggcacgcggcgcacacatatacgctgaaattgttggttatggagcaacctctgatggcgcagatatggttgttccatctggcgaaggtgcggttcgttgtatgaatatggcactgcaagatgtgaaaggttccattgattatgtgaacacgcatggtacatctactcctgcgggtgatgtgaaagagttggaggcgatcagggaagtctttggtgatacaacaccggcaatttctgcaacaaaagcgatgaccggccattcactgggtgctgctggtgtacacgaagcaatttatagcctactgatgttagagcatggttttattgcaccaagtattaacattgaagctcttgatgataaagcggtaggcatgaatatcatcactaaacctactgagcaaaaattgaataccgtgatgtccaatagttttggtttcggtggtactaatgcttctttggtgatgagcaagtattcagcttaa

SEQ ID NO: 10621 - DNA, 1521 bp, Photorhabdus luminescens
atggaaacctggatgtatctcagtcaagggtttgaggttgcaatggtgccgcaaaacctgattattgctttaattggctgttttgtcggtacgattgttgggctgttaccggggcttgggccaattaatggtgtcgcgattctgctgccactggctttcgctttaaaactgcctgctgaatctgccctgatcttattggcaactgtttatatcggttgtgagtatggtgggcgtatatcatcgattctgctgaatgttcccggtgatgccgctgccattatgaccgcattagatggttatccgatggccaaacagggccgtgcaggtgtggcgctatctatttccgcggtaagttctttctgtggttctttgctggcaattttcggcattattttgtttgcaccattactggcgcagtggtcactggctttcggccctgctgaatattttgcacttatggtttttgctattgcttgtctgggtagcatgatgagccagaatccgctgaaatcactattagcagcattaataggattgggtctggcaactgtcggagtagacgccaacaccggggtttatcgttttactttcgacaacgttcatctgtcagatggcattcaatttattgttgtggtaataggtctgttttctgtcagcgaaattttgctgatgttagagagtacctcggccggcaaaaccattatccgcaaaacaggccgtctgctgttcaatcgcaaggaagcggctgaatgcgctatgccaacgcttagatcatcctttatcggtttctttgtcggtattttgcctggtgcaggagcgactattgccagcgcaattacctacatgactgagaagaagctcagtgggaatagcgattcatttggtaaaggtgatattcgcggcgtagcagcaccagaagcggctaataatgcttcggcctgtggctcctttattccaatgctaacattaggcgtgccaggttcaggtaccactgccgttatgatgggggcattaacgctctataatattacgcctgggccgggaatgttcactgaacaaccggatatcgtctgggggttaattgcggctttattgattgccaatattatcctactgattatgaatatcccaatgataggtctatttacacggatgctcactatcccactctggttccttgttccagcgattgctactgtttcagcggttggtgtatatgccatacacagtacgacatttgatcttctgttgatggtaggattgggtatttttggctacattctgagaaagatgaatttcccgatgtcgccattaatcctcggtttcgtattgggagaaatgctggaacaaaatttacgtcgcgcactttctattagtaatggagaatttggcattctgtggagcagcacaattactcagagtttattgatactagcagctctggttctgattattccaccaatattacgaattatccgtaagcgccgtattcagcaaatggctactgaaaataaaacgtaa

SEQ ID NO: 10622 - DNA, 432 bp, Photorhabdus luminescens
atgaacgatcgtatctttgctactatctggttagtactctgtgccattgggatagttattggttggggaattcagagcgaatacacttatgaacctctggggcccagacctttcccaatgatcattctgtctctgatggcactctgtgctttactactacttttcaaaaaaccagagcagagcaattggcctagtgcccccgttatccgtcgcctaatgctgttgattctctctttggttatttatggttggtcattcgagtggcttggttttcctctggctacagcgctgctgacattcagtgtcgcgctgttgtttaacgcaacactgcctgccgcaatcatttccggggtgttccttggcgtcacattatatttcgcctttgaccgcttacttgacgtaaccctgcctctcggtagctggctcaactga

SEQ ID NO: 10623 - DNA, 981 bp, Photorhabdus luminescens
atgaaaactataacgatcaagatgttagcggcaaccgctttactatttggcacaagtagtgtttttgctgccagtgcacctaaccggaccgaatgtattgcccctgcaaaaccgggtggcgggttcgacctgacctgcaagctggtccaagtttcactactggatacgaaagagatcagcaagcctatgcgtgtcacttttatgcccggtggtgttggtgctgtcgcttacaatgctatcgtcgcacagcgacctactgaagcaggaaccattgtcgccttttctggcggctctctactcaatttgtctcagggaaaatttggtcgctataacgttaacgatgttcgctggctggcaagtgttggtactgattatggaatgatcgctgtccgtgccgattcaccttaccgtaccctgaacgatttgatgaatgcttttaaggataatcccagcagcattgtatttggtgccggcgcttctatcggtagtcaggactggatgaaaaccgcactgctggcaaaagaggttggaattgatcctcacaaaatgcgttatgtcgcttttgagggaggaggtgaacctatcaccgccctgctgggtaatcatattcaggcggtttccggtgatctgagcgagatggtaccttatctgaatggagacaaaatccgggttctggctgtttatgcagataaacgactggatggtgatttagccaatattcctactgccaaagagcaaggttatgacctgatatggccaattatccgtggattttacatgggaccaaaagtttctgacgaagagtatcaatggtgggttgatgcttttaataaactacaacaaacagatgcttttaaaaaacaacgtgatatccgtgggttatttgaattcaacatgaccggcaaagagttggacagctatgtgaaaaaacaggttgaacaatatcgtgaacaagccagagcttttggtttagccaaataa

SEQ ID NO: 10624 - DNA, 657 bp, Photorhabdus luminescens
atgatgagaaaattgattctttgcagtgctatgggtagtgctatggcttttactttggcgggatgtaaaacagaactcagtacttcggtatctgttaaccaactgttatctgaacaagttaaaacggtgacatctgatttgttagttgaagtcagtgcctgtggtgattataaagattccagacaatcatcaaaatcattgttagacactcaagaaaaagtaccggctatttttgccaatgcggaatacgtggaatgttttagaaaaagtatggattcgtttgctcactttaaagttcctgtgagtgtagggaattcaagtataactggttctactaagggcattcatctttatggtaatggcgcagatatcttggtgataagcgtaccaaaagcgataaaggagaaaattaaccagatagatagttcaatggcatcaaagaccaaaatttcaattaatattaagaatgatactggtgaagttttaaaaatgacgggtttatccgcattccttaatgataaagagccgatggtgatatcgaattttagtttaaaagtaggtagtgaaataaaactcactttgtctaatgtctctgtggcgtctgcattggatgaacgttttgattttactcctgtgctcatggcaatatctgagtaa

SEQ ID NO: 10625 - DNA, 678 bp, Photorhabdus luminescens
atgcgtttacttttagtggaagaccaccctgaattattgcattggctgcaaaaagcactgagtagttcaggatttgccgtagatgttgctagtgatggtatagttgctgatcaattattacagacagaaaactatgcattattgattctggatgtttctttgcctaggttggatgggctttctctattagttcgtttgcgtaagcgtgggcaaaatttgccggtattattattaacggcgaaaactgatgtttctgagcgagtgaaagggcttaattctggtgccgatgattatctgacgaaaccttttgatttacaggaattggaagcacgtatccgggcattacttcgtcgtagtgcaggtgttctacaggagacgctgacattcggctcccttgtttatcaggatgatggttactttgttctgaacgatgagccattggctttgacaccaagggaactttcggttttgacaacattgttccatcgtcgggggaggcctgtttctaaacaacagctctttgaacaggtatttgcactgtcagatgaagcgaatccacaaagtattgaactttatgtgcaccggattcggaaaaaattatcaggcagtaatgtggggatcagtacattacggggattaggctatcgtctggagcgtcagaaagatgacatggtttaa

SEQ ID NO: 10626 - DNA, 1422 bp, Photorhabdus luminescens
atgacatggtttaaagtaccgaactcattgtttcatcagttactcttgttttttggtgtcccattgtttgtgttgggttgtttatcggttggcacccattattttagtgcagagaatgcggcgacattggcttatgaccgtactttattggcatctgctcgaactgtggcagaacggctgactgttaaaaataaccaattaattgtcgatgtaccttatgtggttctggatagttttgagcgaaatatgaatgataggctgttttatcaggtgttatcacccgaaggggaaataatttccggttatgatgatttgcctttgatccctaaagatacgcttcgctccaatttatacacggctctagtttatttttatgatgctgaatatcacggccggcccattcgggttgctgccctttatcagccgatcaatgaagggggaatgatgggaatggcgttgatactagttgctgaaacagtggcttcccgtcattatcttgcgcaacaattattaatatcttctttgatgagccaaggaaccgtggttgggttgactctgattctggcttattttctgttgaagcagttacttaaaccgctacataaactttctggcgtcatggtccgtcgtcccgcaaatgatcttactccgttaccggatatgttgccttggtcggaactttccccattgttatatgcatttaatcgttatatagagcgactgaaattgatggtgagtcggcaggagaggttcagtgcggatgcttctcaccaacttagaacgccattaacagtattaaaaacgcaagtagcggtagcgcttgccagcaaagatccagcgcaatggaaagaaagcttacaggccattgatagtacattggataacactatctctctgacggatcgtttattacaactttctcgtttgaaagcgcatgaaaaggaggccgttcgggattataggccggttaatctagtcgaattgttgcaacaggcatgtttttctcgtttgcaacaggctgaaagtaagaatattgatttgggttatgaaggcgaaaatgctcaatggatcaagggggaacctgtattactgacggaaatgtgtgctaatttattggacaatgcaattaaatatacaccggaaggtggcattgttacggctagagtgattctcaactcttgtaagacatattgttatttggaagtggatgacagtgggccggggattgctaaagaagacgtcaatttgtctctgatggcttttaatcgtcttgataatgctgcggggcatgaaggggcaggattaggattagctctggtaaaagatatcggtatttatcatggtactcatccccaattattgcccagtgaaacactgggcggtttattagtaagaatcccttttaggctttctgatgattaa

SEQ ID NO: 10627 - DNA, 888 bp, Photorhabdus luminescens
atgaatataattttcccgtttctagcagtcctgatttggtcaattaatgccgtagtaagtaaagcctccgctacagctattgatccggcggcaatttctttttatcgctggttcctagcctttctcacattaaccccctttgttgtactctcggtcattcggcgatggaaaacaatctgtcaatattggtggaaattattaattcttggcgcacttggcatggtactttatcaaagcttggcctattacgctgcgcacagtatcagtgcaacatttatgggaattcttagctcattgattcctcttttgactgtgatcatcagtatatttgttttacgtgttgtccccactgtcggccttgctcttggtaccgttctatctctgtctggtttaatctggttggtcagcgccggtgatcccatatcattattgcaacacggtttaggccgcggcgaattgatgatgttgcttgcttccatctcctacgcactctatggcgtattaaccaaacattggtctattccattacccaactggcaatccctatatgtacaaatcacttttggtgtcctgttattactgccaaatttcctattgaccaaagatgttcaattgaatgccagcaatatctcgttagtcttattcgccggtattccagcttcgatcattgccccctatttatggatacaaggcgtcataaaacttggtgcgaataccaccaccatatttatgaatttgacgccgatatttacagctattatcgctattctggttctgcatgaagagatgcacagttaccacctgattggtggcagtataacgttattaggcgttatactggcacagcaactacgtacccctcttattagaaaaacctcaggaaattaa

SEQ ID NO: 10628 - DNA, 255 bp, Photorhabdus luminescens
gtgaccggggtgagcgagtgcagccaacaaagaggcaacttgaaggataacgggtatagatatactttcgatacagaatcacaggctccatccacttttttcgttgaaatacaatatgtagatgaaccaacactaaaaacgatacaaactataggccctggtgattatctggtccgtagtaacggcggaataggaacagatagaatcaggtgtagaagtcattctataggacaaaacattagaattacttggtaa

SEQ ID NO: 10629 - DNA, 243 bp, Photorhabdus luminescens
atgagaaatttattggttattatgttacttatatctgccataacagggtgttctagtaatccagataaacaagtacaaagagaagatggattgaaatttacattctcatccggtgataaatttatcttaacccgagcctgtacagatcaaatcgattatataggggtagatgaaggcggtaataaccaattagcaatagtggtaaaaaaaataaaccctgttttccctaccttgatacattaa

SEQ ID NO: 10630 - DNA, 1128 bp, Photorhabdus luminescens
gtgaagattctggttgatgaaaatatgccttatgctgatcaactatttcagcaattgggggatgtacaagctattccggggcgtccggtaccggaaggtgtactggatcatgctgatgcatttatggtccgctcagtgactaaagttaatgaagaattactgaaaggccgcgcggtaaaatttatcggtacggcaacggcagggactgaccatgtggatcagtcatggttatcacaggcaggaattgggttttcagcagcgccgggatgtaatgccattgctgtggttgaatatgttttctcagcgttaatgttgctggcggaacgtgataattttgagcttaaggataaagttgtcggaatcgttggtgtcggtaatgtcggaagtagactggctgaacggttagccgtccttggtatccggacacttttatgtgatcctccaagagctgacagaggggacgctggtgaattttggtcactggaaaaattggttaaagaggcggatattctgacattccatacgccactcaataaatcaggtccgtataaaacacatcatctggtggatgtggaattattgtcggttttgccggataaccgcatattgattaacgccagtcgcggtgaagttattgataatcaagcgctgcttactgcattgaaatgtggcaagaaactccgtgttgttctggatgtatgggagccggaacctgatttatccctaccattactggaattagttgatattggtacaccgcatatcgcgggttataccctcgaaggtaaagcgcgtggtaccacacaggtatttgaagcttactgtgaattccttggtcaaccccgtaaagtggctttatctgatttattgccagaaccagatttcagccgggttaccctacatgggaatgtcactcaaagcacactgaagcggttgatgcatttagtgtatgatgtacgccgcgatgataccccgttacggcaagttgccggtcaaaaagggcaatttgattatctgcgtaaaaactatttagaacgccgggaatggtcatccctaactgtatgttgtgataatagagagagtgctgagttgctagctgctcttggtttcagtacagaactgatttaa

SEQ ID NO: 10631 - DNA, 1011 bp, Photorhabdus luminescens
atgtcagaaggttggaatattgccctattgggtgcgacaggggcagtaggtgaagcgatattggcgttattacaagagcgtcagtttcccgttggtgaattgtatcctctcgccagtgagcgtagtgccggtgaaagcttgcgttttaatggcaaaaattttgttgttggtgatgctgctgattttgactggtcacaggtacagctcgctttttttgtggctggattagaggctacggcacaatatgttgaaaaagcgacagaagaaggttgtttggttatcgatagcagtgggttgtttgctatggagcctgatgtacctttagttgttccaggggtgaatcctcatgttttggcggattatcgtaaccgaaatattattgccttagcagatagtatgaccagtcaggtactgacagccattaaaccgctggtggatgcggctggaattgcacgtttgcatttgactaatctgttttctgtttctgttcacggcaaagcggccgttgatgaattagctggacagagcgcccgtttgcttaatggcattccaccggagccaggtcatttcagtaaacaactggcatttaatcttttgccgttgccaacagaagctgaaggttctgtgcgtgaagagcgtctccttgtggatcagatacgcaaaattttacaggatgagggattacccatttcagtgagttgcgttcagtcttccgttttttatggcaatgctcaagtagtccatttggaaacattgcgtccggttggggtggaagaagttcgagaagaattagagcggatggttgatattaacgttgcagatgaaggcgattatccaactccagtgacggaagcatcgggtaatgatgtgctgagtattggttgtttgcgccatgattatggtatgccggaaatattacaattctggtctgtggccgataacatccggtttggtggtgcattaatggctgttgagacagcggaaaaactgattcaggagcaattttactga

SEQ ID NO: 10632 - DNA, 840 bp, Photorhabdus luminescens
ctgatgttcggtacagaacaaacagaatctgtgccaggttcaaagatgaaaattgcattgggaattgagtacgatggcagccgatattatggctggcagcgtcagcaggaagtaaaaagtgttcagggatgccttgaggaagcactatcaaaagtcgccgatgaacccatatcggtattttgtgctggtcggaccgatgctggagtacatgcaacagggcaggttgtgcattttgaaacgtctgttcagcgcaaggatgcggcgtggacaatgggcgtgaacgtacatttaccgccagatattgctgttcgttgggtgaaaaccgtggatgagggtttccatgcccgttttagtgcaactgctcggcgatatcgttacattatttttaatcatcgttatcgtccagcagtgctggccaatggtgtgacccattttcactatccactggatgaaaagcggatgcatcaggctgcgcaatgtatattaggagaaaatgattttacctctttccgtgcagttcaatgccaatctaaaacgccttggcgtaatgtgatgcatattaatgtcaatcgttacggacattacgttgtcatagatattaaagccaatgcttttgtgcatcatatggtgcgtaatattgcgggtagtctgatggaaattggctgtgggaatcaggatattaactggatggcccagttgcttgctttaaaagatcgggcgaaagccgctgcgacggcaaaagccgcagggttgtatctggttgctgttgattatccggtgcaatttgatttgccttgcgctgttatgggacctctgtttttggcagatgatctgatttaa

SEQ ID NO: 10633 - DNA, 702 bp, Photorhabdus luminescens
gtggggaatattatggaatttctgactcattttgttgattttgctaaatttattattgatttcattctccatattgacattcatttagccgaactggtcgcacaatatggtgattgggtatatggcattttgtttctgattttattttgtgaaacagggttagtgattactccgtttctaccgggagattcgctgttatttgttgccggcgctttagcggctctgggctcaaatgatctgaatgtgcatatcatggtggcattgatgattattgcggctattattggtgatgcagtgaactatgctattggtcgcatctttggcgaaaggttatttactaatccaaattcaaaaattttccgccgcagttatttagataaaacacatgagttttatgaaaaacatggtgggaaggcaattattttggcgcgatttgtaccaattatcagaacatttgcaccattcgttgcaggtatggggaaaatgtcttatcgtcgttttgctgcttataacgtgattggcgcactagtatgggtactgttattcacctattctggttatatattcggtgatatgccaatggtacaacagaatttgaaactgttgattgtcgctatcatctttatttcaatcctgcccggagtgattgaaatctggcgtcatcgtcgtacggtgatgaagcagaagagtgataaccggtaa

SEQ ID NO: 10634 - DNA, 945 bp, Photorhabdus luminescens
atgagctggattgaaaaaattcttaataaaagcaacattacccaaacgcgtaaagcgaatatcccagaaggggtttggactaaatgtgatagttgcagtcaggtgctctaccgtgctgagctagagcgcaatcttgaggtttgccctaaatgtgatcatcacatgcgtatttcggcgcgtacccgattggctacattccttgatgaaggagcaacgacggaattagggggggaattagagccaaaagatattcttaaattccgcgattccaaaaagtataaagatcgtatatcagcggcgcagaagcaaacccaagaaaaagatgcgttagtcgtgatgaaaggtaccctgagtggtatgtcagttgttgctgctgcttttgaatttgcatttatgggcggttctatggcttcggttgttggtgcccgttttgtccgtgccgtagaacaggcgttggcagacaattgtcctctgatttgtttttcttccagtggtggcgctcgtatgcaagaagcattgatgtcactgatgcagatggcgaaaaccagtgctgctttagcaaaaatgcaggaacgtggtttgccttatatctctatcatgaccgatccgacaatgggcggtgtttcagcaagtctggcgatgttgggtgatatcaatattgctgaaccaaaagcattgattggttttgccgggccacgagtgattgagcagactgttcgtgaaaaattaccgtccggtttccagcgtagtgagtttttgctggcaaagggagcgattgacatgattgttcgtcgtcctgaaatgcgtgacacacttgcaagtttactttctaaactaactcatcagtcgcagccaggtactaagccaattgttgctgaatttgtggcagaacccgctgatgttgaggcggatattcaaataagtaccaataaagaagatgcctga

SEQ ID NO: 10635 - DNA, 1299 bp, Photorhabdus luminescens
atgcctgacactttacaaattcctcaagccacgtcgccattgatgacgtggctttcctaccttgggaacctgcatactacggccattgatatggggcttgagcgtgtggggaaacttgcccgaactttggcgttggttaatcctgcacctaaggtgataaccgtatccggtactaatggtaaaggtactacctgttgcacgatagaatctattctgttggcggctgggctgagagtgggtgtttacagctctccgcatcttgtacgttataccgaaagagttcgtattcagggtaaagagttacctgaacaggaattctgtcgtgtatttgcggatattgaatctcgtcgcggtgatatttcgctgacttattttgaatatggcacattagcggctttgcaactgtttaaacaagcttgtttggatgtggtcatcttagaagtaggcttaggtgggcgactggatgcgacaaatattgtggatgccgatattgccgcgattaccagtattgcaattgatcatattgattggttgggtgccgatcgcgaacatattggtcgtgagaaagcagggattttccgtaaagatcgctttgccgtggtcggtgagccggatatgccatcttctattgcggaagttgcgggtgaattaggagccaagttgttccgttgtggcattgactggcgtttctctcaacagaataaaaactggcactggcaatctgatgataggctatttagcaacttacctttgccaaatgttcctctgatgaatgccgcaacggcgatgggtgttatttgttgcctgttacgacaagatgataaagtcagtcgagctattaatgagagtgcaatccatcaagggctacagaatgcgcagttgcctgggcgtttccagatagttcgtgaaaagccattgttgatcttggatgtggctcataatccccatgcggcggcttatctggtacagaaattggcccagttgccccgtcagccgggcagtagaatccttggtgtagtgggtatgctaggtgataaagatattgccggtacactgacttgcctgtcacagcaaataaatgagtggtattgcgctccgttgactgaacagcgtggtgcagatgcacagacactggctcagcatcttggacagccacggatatttactgatgtggaaagtgcttggcatcaggcgatggttgatgctgatgagcaagatattgttgtcgtttgtggctcattccacacggtagtgcatgtcatggaggctctggacagggagaaaggaagtggcaagtaa

SEQ ID NO: 10636 - DNA, 684 bp, Photorhabdus luminescens
gtggcaagtaaatttcagaatcgtttggttggtacaattgtattggtagcattgggtgtcattgtgctgcctgcgttgctagacggcaataagaaatataacgaagataaatttgcatcaattcccttggttccaaagccaggggatgagcaagaaattgactctatatctcctctaaatccaccaatattatcagtgcctctggaagatgaaacagaggcattgcagccagaaacactggagcagccggaaataccattggttaccactcctcagcttgcgccgatagtccctcctgctgttcagccagaagtgaagcctcaaccacagattaagcttgaaccaaaaccagatactaagccgtcggcaccggcgcttaagtctaaaccagacattaagtcagagtcgaaacctgaagttaaaccgattgaaacagccccgcaagggcaggcttatatcgtacaactgggtgctttgaaaaatgccggaaaggtagatgaaatcgttgccagactgcgtttgtctggttatcaggtttatacggttccttcatctccggttcaggggcaattaacgaggatatatgtcggtccaaatgcgtctaagcaacaacttgactcggcattatcagaattgaaaagtttgactggattacaagggcaggtaaggagttacaggccgtaa

SEQ ID NO: 10637 - DNA, 507 bp, Photorhabdus luminescens
atggtttggattgattacgctattatcgccattattggcttctcggcattagttagcctgattcgtgggtttattcgtgaggcattatcactggtcacctgggggtgtgctttctttgtagcaagccatttctatacttacttagcggtctatttcacccgttttgaagatgaattggtgcgtaacgggatcgctattgcgttgctgtttattgctacgttgattgtcggttctatggtgaactatgtgataggttctcttgtgcaacggactggattgtcaggtactgatcgagtactgggggtctgctttggggcattgcgtggtgtgctgattgtcgctgctattctgttttttctggatacatttacaccattggctcgaagtgaggattggaaacagtcacaattgatcccgcaattcagtcatatcataaggtggttctttgactacctgcaaaatgcgtcaagtttcttgccggagaaatatacctctccgtttggctga

SEQ ID NO: 10638 - DNA, 1518 bp, Photorhabdus luminescens
atgtgcggtattgttggtatcgtcggttttacaccggttaaccagtcgatttatgatgcgttgacggtgcttcagcaccgtgggcaagatgctgcgggcattgctactattgatggtaacaatggatttcgtttacgcaaagccaatggcttagtgagagacgtgtttgaagcccggcatatgctgcgtttacagggaacgattgggattggtcatgttcgctatccgacagcgggcagttccagtgcatcggaagctcaaccgttttatgtgaactctccatttggtattacattgacacacaatggtaatttgacgaatgctcatgagttgaagaaaaagttgtttgagaatgcccgtcgccatgtgaatactacgtcagattctgagattttgctcaacgtttttgccagtgaactggattgctcccagcattatccattggtgcctgacaatatttttgcggcagtagcggcaatgcataaacaggtgagtggtgcttatgcctgcattgcgatgattattggtcatgggttagttgctttccgtgatccgcatggtattcgtccgttggttttaggtaagcgcactttggatgatggccgtaatgagtatatggtcgcttctgaaagcgttgcattagatacgctaggctttgaattcctgcgggatgttgcatcaggtgaagcgatttatattactgaacaaggtcagttatttactcgtcaatgtgctgaaaatccttctctgactccctgtttatttgaatttgtctatttggctcgcccagattcctttattgataaaatttcggtttataacgcccgcatacggatggggcataagctaggggcgaaaattgcccgcgaatgggaagacttacatattgatgtggttattccaatccccgaaacatcttgcgatgttgcgttagaaattgcgcgcatactcggtaaaccctatcgtcagggatttgtgaaaaaccgttatgttggccggacatttatcatgcctgggcaacaggaacgccggaaatcagtccgccgtaaattgaatgctaatcgcgcagaattccgtgataaaaatgtgctattggtggatgattctattgtgcgtggtacaacgtcagaacagattgtcgatatggctcgtgaagccggcgcgaagagagtttatcttgcttcggcagcaccggaagtacgtttcccgaatgtttatggcattgatatgcccaatgcaaatgaactgattgctcatgggcgtgaagtggatgaaattcgccaacttattggtgcagatgcattgatatttcaggatttaactgatctgatcgacgctgttcgtgaagaaaacccggatgttgacgggtttgagagttcagtattcaatggtgtttatgttaccaaagacgttgaccagacttatctctattatctggagaatctgcgtaaagacgatgaagtaaaactgaataatcagaatgaagttgaaaatctggatatctataatgaaggttga

SEQ ID NO: 10639 - DNA, 585 bp, Photorhabdus luminescens
atgaaaagattgatcgtagggcttacaggagcaagtggggccatttatggtataaggctactgcaagttttacagccagttgaagggatagaaacacatctggttatcagtcattccgctcgccagacactggcacttgaaacagattatagtttacgggatgtgcaggcgctggctgatgttgtgtatgacaacagagatatcgctgctgccatctcttcaggttcattcaaaacttcgggcatggtaattctaccatgctcaatgaaaaccctatcaggtattgtccatagttatactgatggattagtgaccagagcggcagatgttgtattgaaagaaagtcgtaagttagtgcttggggtaagggaaacgccgttgcatttggggcatctcaggctgatgactcaagcggcagaaattggcgcggtgattatgccgcctgtgcctgcattttatcatcagcctcaacagattcaggatattattgaccagacagttaaccgcgtgcttgatcagtttgatattgagctacctcatgatctatttacccgctggcaaggggctaaaagcgttgagatttag

SEQ ID NO: 10640 - DNA, 915 bp, Photorhabdus luminescens
atgcgtattttaatcactggaggaacaggtttgattggtagccgtctggtttgccaacttctttccctatcccattccattactattctaagccgctcacctcaaaaagtttattctctattcagcaatcaagctgaatgctggaccagtctgaaagataaaaccgatctcaacgattttgatgccgtaatcaatcttgctggcgagcccatagtaaacaaactatggacttcaacgcaaaaagagaagctgtgccagagtcgctggacattaacagagcaactcagcaagctgattaatgccagccagacaccaccagaagtctttatttccggctctgcggtaggctattacggggatcagaatcaaacaattgtcacagagcatgagccacctcatgatgaatttactcatcagctctgtaagcagtgggaacaacttgcattacaggcagccagtgataaaacccgtgtttgtcttttacgtactggtgttgtactggcaaaaaacggcggagcactgaaaaaaatgcttcccttgttccgtctcggacttggtggcccgatggggagcggaaaacagtatctgccctggattcatattgacgatatggtgaatggtatctattacctgttaatgacgcccggtttgagtggtccttttaatatgaccgccccttatccagtacataatgatcaatttgccgcaacactgggagaagtattgcaccgtcctgccattatccgaacgcctgcttttgtgctgaaattactgatgggagaagctgcggctctggtactgggcggacaacaggccataccgcataacttggaacaagcgggttttggcttccgttattttcagctaaaagaggcatttcaagacttactggatgctaaatctcaacgcttttag

SEQ ID NO: 10641 - DNA, 621 bp, Photorhabdus luminescens
atgatcgatctgtattatgctccaacgccaaacggccataaaatcacactcttcctggaagaagctggcctttcctatactattcaccgaattgatattagcgcaggagatcaattcaagcctgaatttcttgccatttcgcccaataataagattcccgcgattgttgatcagcaaccaatcgatggtggcaaacctatcgctatttttgaatctggtgccattcttacttatctggcagaaaaaacgggcaagttacttagcaaagatatgcgtgagcgtgtccaaagcctgcaatggctgttttggcaggtcggtggctttggcccgatgctagggcaaaatcaccattttagtcatttcgcaccggaaaaagtcccttacgcgattaatcgttatcaggaagagacaaagcgcttgtatcaagtcctgaatacccaattggaaaaaacaccctatctgagcggtcaggaatacagtattgctgatatctcaacttatccgtgggttcgtgcttatgaacgtcagagtattgatctgaatgattatccggcagtgaaaaaatggtttgacgctatcagtcagcgccccgctactcaaattgcctacagtaaaatctaa

SEQ ID NO: 10642 - DNA, 1530 bp, Photorhabdus luminescens
atgccagacttttcaatacagagagctaatactaggattgatattcctcaaaatgagttgcatcaaacaactacaacagataaaacttgccactgctgtgaaccgttgctgaataatactattgataatccacttacagcaccaacttctgttatcacacgatggaatgaaaaatccgtcgcaaccaataaacaaattgaagctaatatttctcgcttagccggcgaaagcactgctgcccacaaaacggttaattctctcttatccaacctagtgaaactttttgttcgggcagagggtaatgaattaaccgcaatcactaagatgcttaatgcctataccggtgataaacccggttttagtattgtcggtcagcttggcgcaggtggatttactcgcatcattagcgaagcacggcagaatggtgccagctctgatagagctaatacagaaccgctaacattgagggagaaggccactgcttattatgatctcaccaactcagcttatttccgggacactctggagaagatctattcatcacccgaattgaaatcagaattcaaagatataattgatattggttacttggaaagtaaaaactttgcacctgcccgcggttccacgaaggaaaagcccttacctgatcaattagcgctctatacttttaaaaatgaaaatcaatttaatgcctctgaaaatcccgaattatatcaggtgactaaacaggtaaatgggcaagaagttatcagtaacccggctctggctggcaatagtcttacaaaagttcagaatgatttcagagcaccggctcctgataaggatagtgtctggtcagccgccgcttcacttgaggctgataatcgtttgaccaaccgggagttggcgtttgccagtttaaatcctcgcaaccggctggatagaactgactatcaatttggtcaatcagaacctatcaaagcacatcaagaattagctaaggaaaacattatcgtacaacgtggtaacggtttttctgtctggaatgtgaaagaaaataccggattttccaaggatgcagctttgcacaatttgccaactgtcgctgcaccttccggcaccacagatcgttttattactgcggccaggttgttgggtgcgggcctgaaaaatgatcttgctttaggtacgcctactagcagtgaatcaacagagcaatcaattcaacgcggggagcgggaaatgaaagagctcactcgatggctggcaacaggttatctggttgatgataatcatcattctatgattgaagttaatttaggtgcggctaaccacggtttagcgcctcagtggggattgaatctctataccgaacccttctcttctcctatacatgccaaaggatttagcatatccagccaggaaatattggcacaattagaaggccgtgatgatgtccacacagattactctactttcaggaaagatctgtacggcggaagtcgggcaacagttaacgcggatggcagcataaaaacaagctccagataa

SEQ ID NO: 10643 - DNA, 411 bp, Photorhabdus luminescens
atgtccaaattagaaaaattatgcgcagattttgccgatcaaaccaacattatgttgaatctttctaccggcgcagtgcaattgaacattggtgattatggtccctggtggttagaagtagattcaacgggatcaatgctgacttttcatcatacagtagcttcatttattaatagtgatgcggaattttggctctcattaaacagtaatataaatatacttggcggagcatggctcgcattacatcagccaacacaaactattcgtctctgtttattacaagatatagaacgaatcgatgctactgacttggataatattctggggaacctgcaaaaaataagagctgaacttccttttccagaaactaagcccaccacttcagcttcatcccacaatattttggtttga

SEQ ID NO: 10644 - DNA, 105 bp, Photorhabdus luminescens
ttgaaattggcaatatcaccttatcccgctaagtttatcgccaaattcttcataaaagctaaccgtcactatacgttgacgatattatttggttaccacccataa

SEQ ID NO: 10645 - DNA, 1041 bp, Photorhabdus luminescens; identical to SEQ ID NO: 6393

SEQ ID NO: 10646 - DNA, 1878 bp, Photorhabdus luminescens
atgagcgaattatgcccaagcggcactattgatagccaaaaaatgacagaaaattgggtggagtttcaattagttgatgaacaaggtaatccattagtgaatatgccttatcgtctgataagcagcgggaggttgcgagatgagcgcaaaggtgtgactaataatcaaggattgcttcgggaagaaaacttgtcatctgatgcggtaacgttatatatcagtgctcaaccattagctgatgaaatggaacagcgtccattacgggaaaaacgcagtattagggcgtcagttgtcaaaccaaaagcagaaacggaaggtcatcaacaccgttatgtgacaattggacagataagtgatggcttgcctgtcattgataaatggatagaggagaaaccgccacgttatcatttcccagacccagtaccgaaaggttttcgtgttctctcaacaaactgccgatatattttggaagtgtgcccgtttcgtgcatgggtactattgttacatcatcagaaagattattccctggtgaatgcttataatttggcattaatgggattgctgtcatattttgatgataatgttgatatagccggttctattactcatttttttaaccgacaaatgctggatatatcccaattaccgagtaaggtggaaaaaatatcacgtacgcccattgtttatgatgtgccatttagtgaacgttatactgatgttgtatttattgattcaaaagcgggtgaaagtgggataggagatacggagttattttatgtcgctaatcaacaggaaattattgttagctggcggggaacggcgagtgtcaatgacgccctcactgacattatgtatcaaccattgaaattgggttgtgagccagacggtgtatgcagtggttttattaataatggtaaggttcatcggggtttttgggaggcatttaatcttattggtcagttaaaagctcccggttctgatgaaaatgtgtttgataaagttattgatttagctagaagtcgaaacttatttatttgtggacacagtttggggggcgctttagggttattacatagtgcccaactgaaaaaatatcatccttgcttatatagttatgggatgccgcggacattaacccgtagtgcagtacaagaattagaagaaattacacattaccgtcatgtgaatgaaaatgatctagtcccctctatgcccccggaaaaagacttagataattggctttataattattgggggcctttgggttatctatttagtactattgaattgttaggtttaacaaacggtcaggaagttttcttgcatcatggggaaatcgttcacttttataaagctgatctcattattgaaactttaaaaaagagtgattcaaacgatcttatacggctcacagaaatattacctgtcatggcaaaattgtatttgattccgtcattgaataatgaaacgaaagataatatgaaggtggcattggagattcagaaagaattttttaaacagataagcgacgctgataagaacaaatggtttccacgtaatgcaaacccgactttgaaatatgccttgggggtgcctgatcatcgtatgcttaaatatattcattacattggcgatcgaattgcagagttgtttgcgccagacaaatattatttttatcaagatcagaagcaattatttgaaaatacaatgaatgaaaggagtgatattattcctgatattcggcaacgtaatacactatttttgaatatggataaccagttagaacaagcacttattgatactttacaagataaacagagtattttggccttaacgcgttataccaatattgccacacggattgagaaagagttatga

SEQ ID NO: 10647 - DNA, 567 bp, Photorhabdus luminescens
atggaacaagagaatgtagtgaatattgagtggattgatatcgttaatgaaaataatgaagtcatcgctcaggctacgcgtcggcaaatgcgtgcccaacgtttacgacaccgtgcgacttatattgtcgttcacaacggcatgggaaagattttggttcaacatcgtacagtgactaaagatttttatccgggaaatctggacgcgaccgcaggtggtgtggtgctgacgggtgaaaatatgctggattctgcccggcgcgaagcggaagaggagttaggtattgccggtgtgccttttgcagaacatggtagtttttattatgaagcagaggactgccgtatttgtggcgcactattcagttgtatcagtcacggtccgtttgctttacaggaagcggaaattgatgatgtatgctggttgacaccggaggagataaccgctcgctgtgatgaattcacccctgattcgctgaaagcactttctctgtggctgacacgtaataacgattttgatgaaattattgtttataaaaaaaatgagaatagtccaaaaagagttatctaa

SEQ ID NO: 10648 - DNA, 285 bp, Photorhabdus luminescens
atgcacaatgataaaactgacgcctacgtcaaacgattcaatcaggtatttaattatattgagcgtcatttggatgaaccgctcacattggaacaactgagtgaggtagcgaatttttcgcgttatcactttcacaggcagtttgccaattactgcggtataccggtagggcgctatatccaattaatgcgattaaagcgtgcttcctaccttcattaccttaattttgtgcatgaagtcgctacacacgaattactgacggatatttacttaccgcttaaatag

SEQ ID NO: 10649 - DNA, 771 bp, Photorhabdus luminescens
atggtattttcatcaagacagagttggcattatttagagcccaaaatccaagaattacatgagatatcatccaagcttaattttagatatctttctgatgttagaagcggaagtcgtttcctttttgaaataaatgaactcatcagaacggttaatcatgagataggtacaaattgcttatctgctgatggtggtattgcaatcctgcaagatgaaatagataacctaaagagacaggaatttgacctgttaatgaatgatagccagatatatatgattgttcaaaaagaagaagaggatgaaaaaaccaatttaactttgaaacgaattggttttgttagcggtggttctcagatttttgccggtcttggcgtatgtgtggcctctcttggcgccgcttgtgccggttttggtgtacctctactgatacagggaggaaataatgtttatgagaatgggtattacctgttattaaggaaagaggtttcaggtccggtaagagatgtttatcgtgatgcagctaaaacgcttggttatagtgaaactgatggtgatagagtttacggttatgtagatctggcgttgtctgggtacggaatggcaagatctgttgtgaggcccggaacttttcgtttatttcggtatataaaaactgattacattaggggatggcaggtgatggggaggatacctttgattgctgaacttattggtgatatggtgacaggtctcagtatttattcgatttctgaaggtgagaaacatgaatga

SEQ ID NO: 10650 - DNA, 525 bp, Photorhabdus luminescens
atggtggtgtgctggtatatatattcccacattattttagcattgacgattatgattcaattagatatggtgcgaattttcttttatttttatatccttgtcttcttattatggatagaccctatagtaaagaaaaggaaagcagagataatggtgaaaaagatgagtgatgatgtgacattatcctattacaatgtcttttttgtaattatttattacgcaatgtctattttggtgcttattgtactgtttaagttgagggaatatgtaaggggtcatattcgaacggtgctttttactgttatctttgtgattgttaatactgtacagcataacattgctgtaaatggcggtgtactggtatatatatttccacattattttagtatttatgattatagatcaatccggtttggtgctttgttttttgcaattgcatattcttgtcttcttactatgaataaatctgatagtgaagaaaaagaaaaagaaaaagaaaaagaaaaagaaaaagaaaataattga

SEQ ID NO: 10651 - DNA, 480 bp, Photorhabdus luminescens
ttggctgacttaatctatctgacgataaaaggaaaaaatcagggactcatctctgcgggttgttcatcaattgactcgattggtaataaataccaagttaaccatcaagatgaaattctggtttacggtttgagccactcaatgttacgtaagaaaaacgttaaacatcaaccggtgataattagaaaacccattgataaatcaacacctctgttaggtgttgcaatttccaataatgaagtaatggattgttttattaaccattatcggacaagtttaaatggaggattagaattatattttaatttaaagctaatcggagctcaaatattggaatacagtgtactccatcctaactctttagaaaataatgaccagcaacctcaagaaacgctatcgttaatatataaaagtataacgtggaaccatattatcgcagggaccggcggttatagtatatgggaagatacggtatattaa

SEQ ID NO: 10652 - DNA, 153 bp, Photorhabdus luminescens
ttggttttaaagcaattgtttattgacgatatcggtgttattaacacgacattcagtaatgcagattttgactttgagagattctgttgggaattattgttggttgattttattaatagacaggaagaatgcagcgttattcttggaagataa

SEQ ID NO: 10653 - DNA, 315 bp, Photorhabdus luminescens
atgttacagaaggttatgtgtggttacaccataccgataagcaagtttaaatccaatcctagcgcggccttggcggaagcccaaggagatgctattgctgtctcatcaaacaatcagatccagttttatgctgtgcctgcacatatgtatgaagagattattaattttgttgagtttgctcaacgggggacaactgagttaaaaaacattcctgctaattttactggtgaaggtttggatatgaatcagattgctactgagatggcaacgaagcttaaacacggctccactggagattacgaagaatggtcataa

SEQ ID NO: 10654 - DNA, 180 bp, Photorhabdus luminescens
atggtcataaaaaacatacaaatttcttcaaagaaggggcaaggcaagccattagtgatttgcgagtttgatgaacaaggagtgctttcagctaccggcaattttcaccttaatgaaagtgagatgaaaaaagttgcagataaaatggcggaattgctgatcaagaaaaagggaaattaa

SEQ ID NO: 10655 - DNA, 405 bp, Photorhabdus luminescens
gtggtaagaatattcacatacagcaatttgaaagatgctttgggtgaacaaaaaaccaaagccttggttgatgacttcaaagcctacaaagaaggaaaaggtttgcccattacctttggtcgggatgttccctataagttcacgaataaccgttcttaccttgagttgcaacacttgcattacagagaaagtggtttttcactcaagctggtgcaatttagacgaacgagcggttatgttctagtttactgttctgggttctttgaccgaagtacctatttgttaattgcgattattaagcactggaatcacaatgaatctaatgacatagtgggaactgacagagacattggattaatggacgagcttgaaaagattgccgaacgcttcagggaaaaattttaa

SEQ ID NO: 10656 - DNA, 429 bp, Photorhabdus luminescens; identical to SEQ ID NO: 7532

SEQ ID NO: 10657 - DNA, 300 bp, Photorhabdus luminescens
atgcacgtaactttggttgaaattaatgttaagcaagacaaattagacgaatttattgaagtttttcgcctcaatcatctgggatcaattaaagaagcaggcaatttacgttttgatgtattacgggatgaaaatatccctacccgcttttatatttatgaagcctatgttgatgaaaacgcggctaacacacacaagcaaacctctcattatctgaaatgtgttgaacaacttgaatctctgatatctgagcccaggaaaaagagatcgtttattggtgtgatgccagaaataaaataa

SEQ ID NO: 10658 - DNA, 876 bp, Photorhabdus luminescens
atggcagatttagatgatattaaagatggtaaagattttggtattgatatcccgcagaagaacagcctgtttgaactgaaaggctgcggcgcgctggattggggaatgcaatcacgactttcacgcatttttaatcccaaaaccaatcgaacggtgatgttggctttcgaccacggttattttcaggggccaacaaccgggcttgaacgcatcgatatcaatattgctccgctgtttccccataccgatgtcttgatgtgtacccgcggtattctgcgtagtcaggttccacccgcgaccaacaaaccggtggtcttgcgggcttccggtgccaactcaattctgacggagctgtccaatgaggcggtcgcggttgcgatggaagatgctttgcgcctgaatgtctgtgcagtagccgctcaggtctatatcggctctgaatatgagcatcaatcaattaagaatattatcaaattagtcgatcagggaatgcgttacggtatgccaacaatggcagtcaccggcgttgggaaagatatggttcgggatcagcgctatttttctctggcgacgcgcattgcggccgagatgggcgcacaaatcattaaaacttattatgtcgatactggctttgagcgtattgccagcggatgtccggttcctattgtgattgccggtggtaaaaagttaccagaaaaagaagctctggagatgtgttaccaggctattgatcaaggggctgccggtgttgatatgggacgtaatattttccaatccgaagcaccggttgccatgttaaaagcggttcaagcagtcgtacaccagaatgagaatgccagcaaagcttacgagttatttttaagtgaaaaacaataa

SEQ ID NO: 10659 - DNA, 1020 bp, Photorhabdus luminescens
atgaaaaccctaatcctgaaaaaactggctctaattagcctgttaagtctggcttgcgcctcttgggtacacgccgccgaaagaatcgctttcatccctaaactggtcggtgtcggcttttttaccagtggcggccaaggtgcggtagccgccgggaaagccttgggtgtcaatgtgacctatgatgggccaactgaacccagtgttgccgggcaagttcagcttatcaacaactttgtgaaccaaggctataacgctattgtggtctctgcggtttcaccggatggcctgtgccccgcgttgaaacgcgccatgcaacggggagtgaaaatcctgacttgggattcagacacttcaccggaatgccgttcaatttatattaaccaaggaacgccaaaccaactgggcggaatgctggtggatatggctgccaatcaggtgcaaaaaaagcaagccaaggtcgcgtttttctactccagcccaacggtcactgaccagaaccaatgggtaaaagaagctaaagataaaattgccgcggaacatccaggttgggagattgttaccacccagtttggttacaacgatgcaaccaaatccttacaaaccgcagaagggatcttaaaagcctggagtgatctggacgccattattgccccggatgccaatgccctgccagccgcggcacaagcagcagaaaatctgaaacgacaaaatgttgcaatcgtgggtttcagcacccccaatgtcatgcgcccttatgttgaacgcggaaccgtcaagcaattcgggctatgggatgtggttaatcaaggcaaaatttcaatccatgtcgccaatgaattactcaagaaaggtgatttaaatgtcggtgataaactagatattcccgatattggcatggttgaagttgtaccaaaccgcgttcagggttaccgctatgaagctaagggaaacggtattgttgttctgcctgaacgggtcattttcaccaaagacaatatcaatcaatacgatttctaa

SEQ ID NO: 10660 - DNA, 1002 bp, Photorhabdus luminescens
atgaatatcggtcaacgttatggctgggaattcgccttagccgcattactgattattgaaattctgctgtttggcatagcaaacccgcgcatgctggatatcaatatattgttgctgagtaccagtgattttatctgtatcgggattgtggccttgccactgactatggttattgtcagtggcggtatcgatatttcattcggttcaactattggtctgtgcgcgatatcactcggagtgatgaatcagactggtattccaatggccgccgctattcctttgacactactggtcggtgcaatatgtggaataatcaatgcagcactcattttatataccggcattaacccgttggttatcacactcggtaccttatatctgttcggtggcagtgccctgctgctttccggcatctccggtgcaaccggttacgaaggtattggtggctttccacccgcattgactgattttgccaatttgactttgtttggcctacctatgccattgatgctatttctactctgtgtccttatttgctggctgttcatgcatcgtacccacagtggacgcaatatttttctgattgggcaaagcagtaaagttgcccgttacgcggcaattcctgttgcccgaaccctatatcttctctattccctgaccggcatagcttctgctattgccgccattgtattagtttcttattttggatcagcgcgctccgaccttggcgcgtcatttctgatgccagccatcaccgcggtagtattgggcggagccaatatttatggtggttcaggttcaattatcggtaccgcgctggctatattattaattggttatttacaacaggggttacaaatggccggcgtccccagtcaggtatccagtgcccttgccggtgccctgttaattattgccgtggtaggacgttccatcagcttgcaccaccaccaaatccgtgactggatacaacgatggcgaaatcagagattgtcttcataa

SEQ ID NO: 10661 - DNA, 1002 bp, Photorhabdus luminescens
atgttgaaacttatccagaataaccgcgaaattaccgcattgattgccattctctgcctgtttggcttactcagtgttatcgaccaccagtactttagcttacaaactgtcaccctcgtttttagcagtgcgcagatccttatcttgcttgcaatgggggcaacactggtcatgctgactcgcaatattgatgtctctgtcggctcgattgctggcttatgcgcggtcattatgggaatgtcactgaatgccggctttagcctgtccgtttcctgcctgttgactcttctgctcggcatgtgtgccggatttttcaatggcgcactggtcacctggttgaaaattcctgcgatcgttaccaccctcggcacgttggggctttaccgcgggctgatgttattgcttactgacggtaaatggattgaaggcttaccagacgaattaaaacgcctttccgcacctttatggctcaatatctcaccgatcggttggttgttaatgatcctgatattagcaatggcgtggatactagcaaaaaccccatttggccggagcttttacgccaccggagacaacctgcaaggcgctcgtcaactgggcgttcgtacagatagcattcaaattatcgccttttccgtgaatggtgtcatggccgcgctggccggaattgtttttgcctcccagatcggttttatcccgaatcagaccggcagtgggctggaaatgagagctatcgcagcttgcgtgctaggcggtatcagtctgcttggcggcaccggtacagtgatcggtgctattttaggcgcatttttcctgacgcagataaacagcggattagtactgctaaaactccctgcctggtggaatgattttattgccggatttgttctgctggcggtattgatttttgatggacgccttcgttgtgccatcgaaaaaaatatccgccaacagaaatatgcccgtttcctcaaaaatgacaaaagtaatcaggtgacataa

SEQ ID NO: 10662 - DNA, 1536 bp, Photorhabdus luminescens
atgttacataacaacaccgcagtaccaccgctattagaagtcagtggcatcagtaagcaattttccggcgtaatggtactgaaacatattgattttactctgtttccagggcagatacaggctctgttagggggtaatggtgcgggcaaatcaacactgatgaagattattgctggtctcgaacagccggataaaggcacgctcaagattagcggtcatcatgttagccatcttaatcccactaaagcccaccaattcggtatttatctgataccacaagaaccactgttatttccgaatttgtctgtacaggaaaacatcctgtttcgtttgccaaagcatcaggtagataagtctaaaatgaaacagctactggcattacttggctgtcaattagatctacatgtcagtgctggcagccttaatgttgccgatcaacaactggtcgaaattatgcgtggcctgatgcgtaattcgaaaatcttaatccttgatgaacctaccgcctccctgacaccagtagaaaccgaacgcttatttgcccagctccgtgagctacaacagcaaggtgtcggcatcatttttatttcccacaaaatccctgaaatttaccaactagcagatcaggtcagtgtcatgcgtgacggcactattgccttaagtggcaaaatccgcgattacacaacggatgacattattcaggctattacaccggccgcaaaagatcagccattaaatggcaccccaaaattgggtctggatcttagcaataaccagcaccagacagtacctgatcgaccaatactgacagtcaccaagctgagcggtgagggtttcagcaatatctcattctcagtgaaaccgggtgaaattcttggtttggccggggttgttggtgctggccgtacagaactggctgaaacactttatggcctgcgccctgcggtatccggcgaaattaagttaaaacaacatactgttaatgggctaaaaactgctcaacgtctggcccaaggtttggtttatttgccggaagatcgacagtcatcaggattatttctggattcatcactcggctggaatatctgctcactaacccacaaccgcaatacattctggatacgccctgcctatgatacagcggtacttgaacgctattgccaaatcctaaatatcaaattcagccatatcaaccaaccaatcaaaacgctgtccggtggtaatcaacaaaaaattctgattgctaaatgtctggaagctcaccccgccgtcctgattattgatgaacctacacgtggtgtggatgtcgcggcacgcaatgatatttaccaactgattcgtcatatcgcccaacagcaagtggccattatttttatttcatcggatctggatgaagtggttcgaatcgctgatcgggtattagtcatgcatcagggagaaatcaatggcgagttaactaagcaacagatggatgttgacaccattatgcatatcgctttcggcgaacataaaccacaacaggcggcatcatgttga

SEQ ID NO: 10663 - DNA, 1008 bp, Photorhabdus luminescens
gtggttatgtcgataaaatcagtgaaagaaaaatcagctaaagagaaaaatataccgtctgaggacgccagtccgggtaatagcatgagtgaagaagagctacttgcgcgtattgcatggttttactatcacgatggcctgacacaaggtgacatcggcgatttgcttggtttgagccggttaaaagtctccagattactggagaaagggcggcaatcaggcgtcattcgggtacaaattaactctcgttacgaggggtgtttggcgctggaagataccctgcaaaaacatttctctttgaaacaggtgcgcgttttgcctgcactggcgaatatgaatcttagtgccagattaggggttggtgcggcacatttgctgatggcattgattgaaccgcagcaattattggccgtgggatttggtgaaaccaccatgtgcgcattgcaacatttaagtggttttatctcatcacaacaaattaggttagtcacactatctggaggtgtcggtccttatatgaccggtattggtcaactggatgccgcctgttcaatcaatattatccctgccccattacgtgcttccactgctcaggttgctgaaacatttcgtcaggagagcagcgtccgagatgttttgctagcggcttgtgcggctgatattgctatcgttggtattggtgcagttaatcagcaacagcaggcgacaattatgcgttctggttatatcagtggtggtgaacagctaatgtttggtcggaaaggcgctgtgggcgatatccttggttattttatgcgcgctgatggtgaactggtggaggatatgcagattcatcaggagctgattggtatctccatgccagaactgaaaaccatcccgacagtgattggtgttgcgggaggggaagagaaagcggaagccattattgctgcgctgaatggtcaatatatcaatgggctggtgacggaagaacagactgccagagtcatgctgaatttgctgcgttaa

SEQ ID NO: 10664 - DNA, 1593 bp, Photorhabdus luminescens
atgaatcaacgccgtagtgctaatccatcgggaaaatatctgatggcgcttgatgcaggaacagggagtgttcgtgcagtgatatttgatcttgaaggaaatcagattgccgcagggcaggctgaatggatacatcagcctgtacctgatgtaccgggttcaatggagtttgatttagcgacgaactggcagcttgtttgccaatgtatccgtcaggcgctgaaaaccgcacaattgcctgccagtgctattcagggagtggcttcttgctctatgcgggaaggtatcgtgctttataaccgcaatggtgagccgatctgggcttgtgctaatgtggatgcgcgttccagccaagaagtgagtgaattgaaggcgttgtatgacagcacttttgaatatgatgtgtatcggtgttcagggcaaacattagcgttgggtgcaatgcctcgtctgttatggttagctcatcatcgcccggatatctatcatcaggcgacggccttaaccatgatcagcgactggctggcaaatatgctcagtggtgagttggcagtcgatccctccaatgccggtacgacaggcatgctggatctggtaagccgtgattggcgtcccgatctactggaaatggcaggattgcgttctgatattctttcgccggtaaaagagacgggaaccttgttaggttacgtcacggagaaagccgctgttcaatgtggactgaatattggcacaccggtcattatgggcggtggtgatgtacagctcggctgtcttggtttaggtgtggtcaaacctgcccagaccgccgttattggtggcacattttggcagcaggttgttaatctgcctgaaccggtcactgacccaaatatgaatacacggataaatcctcatgttattcccggcatggttcaggcggagtcgattagtttctttactggcttaaccatgcgttggtttagggatgcattttgcgcggaagaaaagctgttggcggagcgtcttggcgttgatacttatagcttactggaagatatggcggccagagttccggcgggcgcttacggtgtcatacccattttctctgatgtgatgcggtttaaagcttggtatcacgcagcaccttcctttattaacctttccattgatcctgagaaatgcaataaagcgactctatttcgtgcattggaagagaatgccgcgattgtctcggcctgtaacttggatctgatttctgctttttccgcagtgaaaccggattcactggtattcgcgggtggtggttcaaaaggaaaattatggagtcagattttatctgatgtgacagggttgccggttcgggtgccgatggttaaagaatcgaccgctttggggtgtgccattgctgccggagtgggggttgggctttatgatgcaatgggggcgacgggggaaaaattggtgcgttggcaacatgaatatcagccaaatcctgaacattgtgaagtgtatcagaaggctaaacaggactggcaggcgatatacgccgatcaattaacgttggtcgatcatggtttgacaacttcattatggaaggcgccgggattatag

SEQ ID NO: 10665 - DNA, 138 bp, Photorhabdus luminescens
ttgtatttcttaatatgggaacaaattcaaaaagaagaacttccgaaagtcttggaacaggcatatcttcttaatgaaccgtttttaattgagatccctgttgcttacgactataacctattaaagcatgtagcttga

SEQ ID NO: 10666 - DNA, 1026 bp, Photorhabdus luminescens; identical to SEQ ID NO: 6127

SEQ ID NO: 10667 - DNA, 1062 bp, Photorhabdus luminescens
ttgacgccaaagactcacgtttggggagtacgccagcttggttgggcaatgcgttacgccgaattggggctatatcgtttgctcgaatcgaaggaactatcttgtattcacaaaaatagtgcatatgttttgaaaataccaacagaagatcttaattggctggtcacttgcaatacatcttggcaaaagtttgaaaaagaacttttatccaatattaatatttttcgtgatgcagcggcacggttaagtggaatcgcggagtactattcgacgttgttgcagcacttttacccggagacacgtattgtttcagcacagggtaaagtagacgatcttctttcattacaaccgattattgatcaagtgattattcttttaaggcagtttattggagatagattattagccttttatctccacggtagtgctgcccgaggtgatatgagaagtggttcagatatagactctattgttatcgtggataaggtcgatacagttatccttgaagcaattcgctcaacacaatctaggttcaaggatttatccatctctgtatatagtgaatcgaatgttcaccagtatcctagtttcagagcatatgcgctcattaatggaactaagcgtgtctatggggatcttgctttagaaatgaaaccgtcattgaaaagcgatatatatggcattattaataatttatttactataaggcaaatagctcgttcttatctgatttctggtacatatggacatcgagcacattatatgcttgggctgatgatgaaacttaccgatcacggttgcttacgccctttgcaaatcctaaaaagtggtttctatccaacaaagaaaactcaggttttggaatattacagagacaacgaaattttcaccgacattattaaatatacgcaaaacctaaaagaaagtgagaatacgctgaagcaaaaattgcttattggaagtcgagcggaattagaaaatttattctattcattacttgacgcatgtgaaatagtggcagagaaattacatatggtacaggtcgagaagtcaattttatag

SEQ ID NO: 10668 - DNA, 1212 bp, Photorhabdus luminescens
atgacatcgaaaattttggcaagatcaattaacgaattttttgaagtacaacaattgtcagaccaaactattctcaagccaaatcgaaaaataaagatgaagatactcgatgaaggtttaatgcaaacagccatctgtagaagtaatataggtcgaatcgatgaaaaagagttgaagcttgagtaccgaggccataatgtccgagacctagcaaataactattcttttagtgatgttgtgtatcttctgattacaggaaaactaaattcagaaggaagtgaagagtttttagatatgctccataacaattacctatcagcactcaagcatattgaaaagttaacaccagtaatattcgatactactcccactgatttcctcacaattgcagttttatcttcgcagggtaaatggctttctgactgttctgtaaaaacaaaggacgaacgtttgataattactgcatctattttggcagcaatagctgccgcaattgctatatatgctcagaaatatgctatatccgaacctgtatttaaaacttttttcggtactaagcatcgattctttgcaagctttttagcaacatgttttggccaacagtgtgacgatgtagcagaagaaatgttaaacaagtttttaattcttcatgcagaacatgggctgaactgctcaactgcaaccgttagagctgtagcgagttccggtgcagatccatttaatgctgtagctgcgggtatttgcgcattcagcggtcctcttcatggcggagcgagtggggcagttggtttaatgatcgatgatatacacgacaattctaaaaatattagtacttttattgatgaactagtagaaagaaagcaacgtcttatgggatttggtcatcgaatttacaaacaaccagacccacgagcttcttacatgagcgatattcttatcaaacagaaggcaaaattcgatgttatttcttcctatgtaaatatttcacaggaacttgcatcggaagtatcgaaaaggccgtatttttcgcaacggggattatacccaaatccggatctatttaatgggttgctacttcgtagagctggtttcaagtcgcacatgaatactgctctcctttgctttagtcgtgctgctggttggttggctcattactatgacagtattgacagtaaagcgccaattctgcgaccacaggagctatatttatga

SEQ ID NO: 10669 - DNA, 1365 bp, Photorhabdus luminescens
atgaaaaaaaagcataaaccagtacggaaactaatcgtatttggatgtggtcctcactttttaaatagatatttagatgttctattggagtaccgcgataccattgaggttatgcttatagttgacttgaaatgccgagaaatgaaaattcgctgtgcattaaatgagaagggattaaagcccagagcatacttatttcttgatgaaaaatacagaaattatccagattcagacgaaatttacaggttactttctgcaattccagaagtctatcaggctgatgctgttatagtgagcactgaaccaaaagctcataaagtatatgctctatgggcagccgaaaatggactgaacgtgttcatggataaaccaataaccgccccttattcgtcaaacgcggaaaatttaatggtagattttgcagaactattgactgcttcgagaaaaaccaacagtagatttgtaatcagttgtgaacgtcgaatgcaatttggatatagatatgtggaaaagtttctaactgaattcatgagctcattccaaatacctatcacatcaatgcatgttcattttggtggcgggtggtgggtaattccatcggaaatgctcaatttggaaaaccatccacttaaatacggttatggagtattattttattctgggtatcattatttagatctggtcgctcgctttgcactctacaataaaaaaatacaggatatagacctcctgaaaccacatgtcaaaacaatggtagtccgcccaaatgcgctagcggaagctctaccatttacgacttattcacatgcccttaaggaagaggataaaaatcaagatcaaattgcacatcaattgtcggactatggtgagttagacttctcagtaataggaaattattccaaaggtattcaacatcgaatgtttttcagcatggatctgatagaaacaaccttaactggcaggataatgccgaatagtattccaagcgatggacgaatacgacaggaaatcgtaaatattcatctagggcatttctgctcaattagcatcgtatcgaattcttttcggaaactgacagaaggtgacacgataccggaagattttaatataactattgctacccatccaatgtttacccggaggggagaacaaactgtgttacgaatcaaccgcaaagatctatcacagttaaacccaagcctccctctatgcgcgggcttgaatgtccacgcaagaaaagagcagcttcgcgattttttaagtggtggagatgcgaactcagagttatcaactcacgaaaattcagttgcattgcttgctgcggtttatgaacaggtctctaagacaaacacagttcctcaatag

SEQ ID NO: 10670 - DNA, 1167 bp, Photorhabdus luminescens
atgaacggaaaattagatctgctaccttttactacatttgttcgaggtttccttttttgggccgcagctactgcggccgtgggttatatacctttgtttgtagaaacaacggatttttccacaacacaagcagccgtcttcctatcgggaactgctattggaagaatggtattccagcctattatggggcaatttatctcacctaaaaattgtttacagatatataccggtgcattaattggacttatgtcttgtagcatctgtttattcctttttagcaaccctgttagtttactattgtgttccagactgctggaaggggcttttttttcaggattcattatctcttggcgaacgcagcttaatagattttcccaatctccgaattttgagtcggtgaatgatagctatgttatttcccaaaatgctgggcgtttagcgggtccaatggcaggtgggattatcgttgcgaagtttgacctttatagtgttttcttattctcagcaattctgtattccttgtgtctgataatattgccccaaaaaactgctattacatctactgacaatcatagtcgtgaacatattcggataacgttagctcaactccttagtcgtaattggaggttacttctggttcaccatctggaatttatgtgtcttggtttatggttagcctcatggcctatctttgctgtatacgctagtggattcaatccaatagaggttggctattcgtttgctgttgcggctgcgggaggtttttttgttttaccactgcgtaagctgttacgaaaaatagctttaaaggcacgattcgtcatctctcttatacttttgtttttgcaaccgagcggtgctcttttgatatcagctcacttaggcttttgggtaatgttactattgggtggtcttggcagtaccatttatttcactgcctttcatcagtttatatcgaagacttatcctgttgaacaaatacctgcaatttatggattcttaggaacaagtactttcttagctcaagcagtcggccaagctgtaacaccatatgctcagcaatttggtggagttgatgcaccaattattatcgacgctatattgcttcttatcatgatatcaatcgcttttagcatatataaaaaagggagtgagaaatatgactga

SEQ ID NO: 10671 - DNA, 1611 bp, Photorhabdus luminescens
atgactgattctaattttttcttaagtgaatatgatggtgtcgcgctttcgcctatttcatttctaagacgagcaatactgagtaatggagatgatattgctgtcatagatggagaatgtcattggacttggagccaatatgcatctcggtgtgaaaggcttgcaatagctttgaaaaaaatgggcgtttgtaaagaaacagttgtgtccgcgcttctacccaatatacacgagcttcttgaattacattttgcggttccaatggcaggcggtatcttgaatgcgctcagtacccgaacggactcaaatactttaaattttatatttaaaaaacttaatcctaaggtattgtttattgatagaacctttatttcactgttggatgatgtttctctagacaaacaagtaaagatcatcgttattgatgtggatggcgcagtcatttcagaatcaatttctgaccgggaatttattcaatatgaatcgctgataactacgcataaatcgggagagttgtctttttctctacgagatgaacaagaggcgatcagcataaatgtaacttcaggaacaagtggacaacctaaacttattgtctattctcaccgtggcgtgtttcttaattctatttctaatgttctggattgggatataccaaaacgaccgacgttcttatggacgttaccaatgtttcactgtaatgggtggtgttttccgtgggctatcactgctcggggaggtacacacatctgtatgcgcaagtttgacgcagaagaagcgatattgctaatgcagaagcataaggtaacacactattgtggagcgcctattgtccattgcgcattaggtactattgcgcggaaacaagggctgcattttaaggagaaaattcatggattagtcgcaggtgcgccgcctacagagatgatgttttctctattagattccattggaatagcagtaacgcaagtctatggtatgactgagacatatggcccggtcgttgtgtgtgaagagaagagcgattgggagaagctctctaaatccgtaagaatatccaagaggatgcgtcaaggcattgtctcaaatttacaaggtcaagtttgtgttattgaggaaaatacgggattacaggtgccttttgatggaaagactgttggtgagcttgtaattcgtggaaatatggttgcatcttatgatccagatcggcatgtgactcttgatgcagcaagtcaatggcttttcacaggggatctggctgtcgttgaaaatgatggctatgtcagaattgtagatagaaagagagatattattatttctggtggtgagaatatttctagtctggaattggaaaatatactgtcaaactatcccggtgttttagctgccgccgttgtagcaaagccagattcacattggggtgaagtaccgtatgcatttatagagctcgaagaaacttcatcagttacagagtatgaattggacaattatatttgtacggtaatggcgcgctataagcgccctaaaggttatacttttttaactttacccagaaacgcaagtggaaaaatcataaaagggcaattgagacaattgattaggaattcctga

SEQ ID NO: 10672 - DNA, 1323 bp, Photorhabdus luminescens
atgaatagcactaaaacagtcagtatccaacatgttattaataatcaaaaattctcgaaagttcaatggcaagtattaattttatgtttcttaattgttgtgattgatggttttgacacggtattaatggggtatattgcaccagccgtggttaatgattttaaagtagaaggtgctattcttgggccggctatgagcgccgctcttgttgggttatcattgggttcgatttttgccggtccacttgcggatcggttcggtcgaaagtcagtgttgacaatatctgtcactgtttttggcctgcttagtcttgctaccgctattgccgattcaatacagacattaactattttgcgttttttgactgggttaggtcttggtgcggcaatgtcaaatgcaataactttaatatctgaatatgctccagagaatcggcgatctttgttaataaatatcgttttttgtggttttcctcttggtgcagcggtgggtgggataatttctgcatggattattccacattttggttggcaaggggttttgattttagggggtattctgccgttatttctatcgctatttctcttttctctattacctgaatcacttaggtatttggtttcgaaagggggggcagaaggtaatataagacgaattttgtctaaaatgaccggtaatactttaaatgatataaataagtttacctttgatggagaagaaattatacataagtcgtcaattaaaacggttttatctaatcgattcttaattgggacggcaatgttatggataacctattgcatgggagcattggttttttatgttctgacaagttggatgccgtttttaatgaacgatgttggtttcagtgttagcatggcggcaacattgacagcattatttcctttaggaggcgtaataagcacggttttttccggttggttaatggatcgaattaatcctcataaagtagttgcaactaattatgccctggctggtattttggtcttttttattggtcaggaagaaaatgtattattattgagtattcttatatttcttgccgggataacgatgaatggcgctcaggcgtcgatgggatcaatctctgcacaattttatccgactcattgtagggctacgggagttgcctggatgttaggatttggaagatttggtgggattttcggtactttatttggcgcagaattgatcaggcttgaattaagttatagcactatttttgccattttatccattccagctattatagccgctttatctttaacatttaaggatgtgagttatagaaggcataaatag

SEQ ID NO: 10673 - DNA, 339 bp, Photorhabdus luminescens
atgaatgccattcatttaaatgagtttttaacttgtattcgcataataataaccactttatcaaaatatcgattaccgccagataatattttcagaatgaagtcaaatgacttacccatcaccaaattgaaattatcaatagctcatcatccaatatatagcttttctggtcaaccctcagcccattccatttctgaatgggatctgggtcaacagcagggtattcggcaagctctcatcaataaaataaccgccgatctcatcaataaagggtgtcatgaattctgttcagatgccaaaatcagtaataaacggtcacatcaggcgcatgaacattga

SEQ ID NO: 10674 - DNA, 240 bp, Photorhabdus luminescens
atgttgatgactattgcagaacagcttgaacaaaaagggcttgagcgaggtatcaagcaaggtattgaacaaggtattgaacaaggtattgagcagggtattgtgcaaggccgagaggaaggccgagcggaaggtaaactggaaacggctcgtgccttattacggcatggcgtgagtttggatattattgtcaccagtaccggactgagccgggataaaattgaaacgttaaagcattaa

SEQ ID NO: 10675 - DNA, 975 bp, Photorhabdus luminescens
gtggcaaagaaagaaaaacggcctcaccatgacggattattcaaatattttttaacgcagcctgaaacggccagagagtttctatccctttatttgcccgaagaaatccagtcgttgtgtgacttagccacattgaaactggagcccggcagttttgtggatgagcatttacgtcaactgcacagtgatgtgttgtactcggtcgaaacggcccggggacagggctatatctattgcctgattgaacatcagtccacccctgacccgttaatggcctggcggctgatgtattatgccatgttagccatggcggctcacctgaaaaaaggccatactgaactcccgttggtggcacctctgctgttttatcatggtgagattcggccgtatccttactcaaaccggtggctggattgtttcacgctccccgaacaggcggctcgcttataccgtcaggcgtttccgttggtggacgtcagtgtgctcagcgatgaagagatcctgacgcataaaggggttgccctgatggagctggtgcaaaaacatattcgctgtcgggatatgcaggaatggctcctccaattggtggaactcttgaatgcggggtataatacaactgagcagcgcaatgtggtgttacgctatattttactgaatggacatacgccggatctctcacaatttgtccatcaactgattgaacaatctccggagcatgaaacgatgttgatgactattgcagaacagcttgaacaaaaagggcttgagcgaggtatcaagcaaggtattgagcaaggtattgaacaaggtattgaacaaggtattgagcagggtattgtgcaaggccgagaggaaggccgagcggaaggtaaactggaaacggctcgtgccttattacggcatggcgtgagtttggatattattgtcaccagtaccgggctgagccgggataaaattgaaatgttaaagcattaa

SEQ ID NO: 10676 - DNA, 102 bp, Photorhabdus luminescens
ttgggggcagcgatgtcagaaaatgaagtattggacggtatgtttggtactgttatccaagtatcctctggcggaagggtttctttcgtaaaattcatctaa

SEQ ID NO: 10677 - DNA, 126 bp, Photorhabdus luminescens
ctgcctatcttcaatgccaattatcctgataacagaatgaaatattccatttttattcctatttttcagataagctcaattaatttactgcaacttttgttgactgatcctaaatttcataattaa

SEQ ID NO: 10678 - DNA, 9936 bp, Photorhabdus luminescens
atgaaaaataatattgctaaagtgggaagtgcatttaaaactcagacgtcagaaaatataaccgatgcaaatgatgtttcacaacaaactcgaaatacaaagaatacccttcaaagactcacatccagtgaattattctggtatgagcgtcttgctgcttttcaacccctccagttacctttcgaaaccgccggagaccaaacagaacctatatgggcaatgagcgcttggcagccccctctgccaaaaaatggtgaagaggagccattgcgaacgttgttgcagacttttgtcatttaccttgcgcgtttgactcagcagaccgtattccaaatcggttggagcgtggataaggtaaaagatgaatcggcaaatctggcaccggtggtgcctatggccgttgaggtagcgtttgataagccttggcgtgaggtagctggctgggttgatgacgagttgtcccgtttggtgcagtacggcacatttagttgtgatctcttctcttgctctccttcattgcatgctatcccggcgttggcgacaagtcggccgtggcgaatcgctgtctcgttgatcaagggtgataggccacgcgatcaaaaggtatccggcgaattgttgaccttccagataaatgcacagggagggtttcgttggatctacgatgaaaaccgcctgtgcacggaagtcgttttacggatgagcgagcacttacaggtgctggcagcctcgaaaaggatgggggatgaaattcccattgggcagcttaatttgttgccagaggccgagcgaacattgttactggaaacttggaacgcgactgaaaccccctatcctgatccgttatgtattcatcagctatttgagcaacaggtagagcaaactccggaggccacggcgttagagtatcaagggcagcgcctcagttatgccgagttaaatgctgacgctaaccggctggcgcaccagttgattgcactgggtgtcgtaccggaccagcgggtagcgatttgtgtggcacgctccccggcgatggtggtggcgctgctggcggtgctgaaagcgggtggggcttatgtgccgctggattcaacctacccggcggaacgtctggcgtatatcctaaatgatactgtcccgtcagtggtattggctgatgcgaccgggcgggccgcgttgggtgatgtcgcgctagccgggttgaccgtgcttgacccgaatatcctacctgatcaaccggacagcaatcccttagtgacggcattgacaccacagcatctggcctatgtgatttacacctccggttcaaccgggcagccgaaaggggtgatgatagaacatcaggcgatttatcaacgtcatctgggctttaacgacacttatgccgtcactgagcaagatcgggtgttgcaatttgccgcttttgcgtttgatgtttcagtcgaggaatttttctcggtattgtgtaacggggccacactggttatccgggatgatagctggctagcttcggtacgggaatttattgctttaacccggcaacatcgtatcacgatcgtttctctgccgaccttattctggtctgaactggcggccagagatcccgagctaccgctgccggattgcctccgactcgtcatgattggtggtgaggcggtaaaaaagaacgccgttcaggactggtttatgcaggaaggctaccggccccggttgttgaatggttatggcccgacggaaaataccgtgacagtgacttataaggagatattatccccggaagatgcccgttctatcggccggccggttaaaaattcccgcatctatctgttggacagagaggggcaaccggttccattgggtggcattggcgaaatgtacattggtggcgtgggtgtggcgcggggttatctgaaccgacctgcattgagcgcggaacgttttttaccggacccctttagtctggaacccgatgcgcggatgtatcgctccggggatttggcccgttttctgccggacggtgagctggaattcctgggccgtaacgatgagcaagttaagatccgtggcttccgggttgagttgggggaaattgaaacccgtttggtggaacacccggcggtacacgaggcggcggtgctggtactggatgacgggcagcacaaacggctggtcgcctatgtggcggcacaagcgcacgagagattggccgctgatttgcgtgaatatttgagtgcgattttacctgactatatgatcccggtcgcttttgtgtgtctggataccttcccgcagatgccgagcggtaagctagatcgccgggcattaccggcactgcgggaagaagattttgcccatcagatttatgaagcaccgcaaggggaggctgagatcgctctggcggctatctggcgtgaattattgggcattgagcagataagccggcatgacagtttctttgcattgggcggccattcgttgcttgcggtacgtatgattgaacgcctgcgtcacttggggttgacattaacagcgcgtgatctattccagtcgccggtgctgtcagcgctggctcaagcattgggacagcaccaagctgtgataataccgcctaacatgatcactcccaccaccacggcgttaacgccggagatgttgccgctgattgatctgactcagactgatattgatcgcatcgtggagcgggtgccgggtgggatgagcaatattcaggatatctatgcgttgtcgccgttgcaggacggtattctgttccaccacctgttggaacaggaaggcgacccgtatctgttacactatccggtggtctttgctaaccgatctttgctggaccgttatctggcggcggtgcaacaggcgattgatcgccatgacaccttacggacggcttttatttggcaaggattatcagctccggcacaagtggtcttgcgccgggcacagttgcccgtgacggaactgacgctagacccggctgacggcccagtcattgaccagttaacccggcgttttgatccgagtcagtatcgtcttgatctggggcaggttccgttattgcattttgttgtcgctcaggaaacggacggtcgttggtttttactggaagtgcagcatcacctgattggcgaccatgaaacaatggaagtgatgcatcgtgaagtgcgggcctattttgccgggcaggaagagcacctgcctacgccagcccctttccgcaatctagtggctcagtcccggctgggggtgagtcaggaagcacatacccgcttctttaccgacatgttggcggaggtggatgagccaacgttgccattcgggctggcggaggtgcatcgtgacggatctcgcatgacggaatcccaccggatgttgaccaccacgttaaatgatcgcctgcgcagtcaggcccggcgtttgggtgtcagtttggcagcgttgtgtcatctggcttgggcgcaggtgctgtcgcataccagcgggcaagagaaagtggtgtttggcaccgtcctgtttgggcgtatggcggcgggggaaggggcagacaatggcatggggttgtttatgaataccttgccgttgcgactggatattgacgagaccccggtagaggatagcgtacgggcggtacatctgcgattggctgaattgctggagcatgagcatgcttcactggcgttggcccagcggtgcagtgggatacagggtgaaaccccactctttagcgccctgttcaactatcgccacaatgagcaaccggcggcgttggatgagacgatggccgggattgaattcttgggtgaacaggaacggactaactatccatttgggttgtcagtggaggatgggggggcttcgttggggctgaccgctcaggtggtacaaccgtttgaacccgatcggctatgcggttatatgcaacaggcgctggaaagtctggtggaagcgcttgaacagaccccggagacgccagtacgtgtgctgaacgtcctgcctgaaacggagcgcacactgttactggaaaccttaaatgccacggaaaccccctatcctgacccattatgtattcaccaactgtttgaacaacaggtagagaaaaccccggaagcgactgcgttagtctatgaagggcaaacgctcagttatgccgaattaaatgcgcgtgccaaccgctttgcccaccaactgatggcattgggcgtcacaccggatcagcaggtggcgatttgcatggcacgttcaccggcggtagtggtggctttgttggcggtgctgaaagctggcggggcttatgtgccgctggatccgacttatccgggagaacgtctggcgtatatcctgaatgataccgctccgtcagtggtattggttgatgaagctggtcgggcggcgctgggtgaacaggcactggctgggctgacggtacttgactcgaatatcctaccagaccagccggacagtaacccgcaggtagccgaactgacaccacaacatctggcttatgttatctatacctccggttcaaccgggcagccgaaaggggtgatgatagaacatcaggcgctgtatcaacgtcatctgggttttaatgagacctatgcagtcaccgcgcaagaccggctgttacaatttgcctcttttgcgtttgatgtttcagtcgaggaatgttgtttgtcattgtgtaatggtgccacgttagtgatgcgtgatgagcgttggttaacctctatgcaggaatttattgccttagccgggcaaaaccgtatcacagtgatgtctctgccggcgttattttggtccgaactggttgccagagacaatggattaccgttaccagattgcctcagactcatcatcattgggggtgaggcagtgaaaaagagcgctgttcaggattggtttacgcgggagctccaccgacctcgactgctgaacgcttatggcccgacggaaaataccgtgacggcgacttgtaaggagatattattcctgacagatgatcgttctatcgggcggccggttaaaaatacctgtatttacctgctggacaaatacggtcaacccgttccattaggctgcgttggtgaaatgtatattggcggcgtgggtgtggcacggaattatcttaaccagccggaattgagtgctgaacgttttatagccgatccctttagtccgatagccggtgcgcgcatgtatcgcacgggagatttggcccgctacttgccggatggtgagctggaattcttgggccgtaacgacgaacaggtaaaaattcgaggcttccggatcgaactgggggagattgaaactcggttgatggaacaccctgcggtacaagaggcggcggtgctggcattggatgacgggcagcacaaacggctggtcgcctatgtggcagcgcaagcgcatgagagattggctgctgatttacgtgaatacttgagtacgattttacctgactatatggtaccggttgcctttgtacgtctggataccttcccgcagaccccgaacggcaagctagatcgccgggcattaccagcaccgcgggaggaagattttgcccgtcaagtctatgaagcgccgcaaggggaagctgagatagctttagcggccatctggagtgagttattgggtattgagcagattagccggcatgacagcttctttgtgttgggcggccattcactgctcgcggtacgcatgattgaacgcttgcgtcgcttggggttaacactggcggcgcgagatctgttccaatttccggtgctgtcagacttggctcaaacagtgggacagcatcaggttgtagtggtgccgcctaacgtcatcacgtcagccactacggcgctgacgccggaaatgttgccgctgattgatctgactcagactgatattgatcgcattgtcgggcaggtgccgggtggagtcgctaatattcaggatatctatgccttgtctccgttgcaggacggtatcctgttccatcacctgttggaacaagaaggcgatccgtatctgttgctctatccggtgatctttgagaatcgctctttattggaccgttatctggcggcggtgcaacaggcgattgatcgccatgacatcttacgtacggcttttatctgggaaggattatccgttccggcgcaggtggtctggcgtcaggcgcggttgcctgtgacggaattgacgctagacccgacggacggtccagtcattgaccagttaactcggcgttttgatccggggcattatcgtcttaatttaagtcaggcaccgctactgcattttgtcatcactcaggaaaccgatggacgctggttcttactggaattgcagcatcacttgattggtgaccatgaaacgctggaagtgatgcaccgtgaagtgcaggcctattttaccgggcagggggatagcctgccggcaccggtgcctttccgcaatctggtggctcagacccggttgaagggggatcaggcggcacatacccgtttctttaccgacatgttggcggcggtggatgagccaacattcccattcggactgacggaggtgcatcgtgacggctctcaaatgagggagtttcaccggatgttggcacctgagctgaatgatcggctgcgtagtcaggctcggcatttgggtgtcagtttggcggcgttgtgtcatctggcttgggcacaagtgttgtcgcataccagtggtcaggagaaagtggtgtttggcaccgtcctatttgggcgcatggaagcgggagaaggggcggacaatggtatggggttgtttatgaataccttgccgttgcgactggatatcgatgagaccccggtagaggatagcgtgcgtgcggtacatctgcgactggccgggttgctggagcatgagcatgcctcactggcgctggcccagcggtgcagtggtattgccagcggtacgccactctttagcgctctgttcaactatcgacacaatgctttatcggccacatcggatgacgtcatcagtggtattgaatttctggatggacaggaacgaacgaactacccatttgggctgtcgatagaggatgggggttccacgttggggctgaccgctctggtggtgcagccgtttgagccagagagactatgcgattatatgcagcaggcgctggaaagtctggtggaagcgcttgaacaggccccggagacgccggtacgtatgctgaacgtcctgcctgaaacggaacggacattgctactggaaacctttaatgctactgagaccccgtatcctgatccattatgtattcaccaactgtttgagcagcaggtaaagaaaaccccggaagcgaccgcattagtctatgaagagcagactctcagttatgccgaattaaatgctcgcgccaaccgccttgcccatcaattgatcgcattgggcgtcataccggatcagcgggtggcgatttgcatggcacgctcaccggcgatagtggtggctttgttggcggtgctaaaagccggtggcgcttatgtgccgctggatccgacttatccgggagaacgtttggcgtatattctggatgatacggctccgtcagtggtattggttgatgaagctggccgggcggcgcttggcgaagaagcgctcaccggattgaccgtacttacgctgaataccctgccagatcaaccggacagcaatcctttggtggctgcattgacaccacagcatctggcctatgtgatttacacttccggttcaaccgggcagccgaaaggggtgatgatagaacatcaggcgctgtatcaacgtcatctgggttttaatgagacctatgcggtgactgcgcaagaccggctgttacaatttgcctcttttgcgtttgatgtttcagtagaagagtgctgcttgtcattgtgtaatggtgccacattggtcatgcgtgatgatcgctggctgacttctatgcaggaatttattgccttagcttggcagaaccgtatcacagtgatgtctctgccggcgttattttggtctgaactgattgccagagacaatacattaccgctgccggattgcctcaggttcatcattattgggggtgaagcggttaaaaagagcgctattcaggattggtttgcgcgggaaacccaccgacctagactgttgaacgcctatggtccgacggaaaataccgtgacggcgacctgtcaggagatattatccccggctgatgatagttctatcggccagccgcttaaaaatacctgcgtctacctactgaacagagacggtcaacctgtcccattaggctgtgttggcgaaatgtatattggtggcgtcggggttgctcggggctatcttaaccagccggaattgagcgcggaacgttttatagccgatccctttagtccggtatccggtgcgcggatgtatcgcaccggggatttggcccgttacttgccagatggcaatctggaattcctggggcgtaacgacgaacaggttaaaattcggggcttccggattgaactgggggagattgaaatccgattgttggaacacccggtggtacaagaggcggcggtgttggtgtgggaggatggacgggacaagcatttggtcgcctatgtggtagcggaagcgaacgaaggtctgacggccagtttgcgtgcacatctgagtgctattttgccggattatatggtgccgtcagcttttgtgcgtctggataccttcccgcaaaccccgaacggcaagctagatcgccgggcattagccgcgccgagggaggaagatttttctcgtcaggtctatgaagcgccgcaaggcgagacagaaaccacattggcggcgatttggtgtgagctattgggtgttgagcaggtcagtcgccatgacaacttcttcgtattaggcggccattcactgctcgctatgcgaatgacgaatattgccgcgggtcgagggatggtttgtacattgaataccttgttccaattcccggtgctggctgaactggccgcaaaaattacctcggatttactgtctcaaccgcaaaacagcgccatatcggtacgatctgatggaacagagctgccgctgttctttgttcccagtggcatgggtgattactcctatgctttcgggctggctcagcatattgcgtcgggctacccgatttatgcgctgccttggccgtccatcaatgaagaaccgatgtcaacgatggaagagcaggctgccagaatgatcactttgatgaaagccgttcaaccggcaggcccatatcggataagtggttactcttctggtggaatattggcttacgctattgctcaacagcttttgggggctggcgaacaggttaatttcctggggttgattgacacgctcgctcctcattgttttgatggacagagctttggtcagcagatagcgcaacccaaacatcaattttttgctgaactggtcaggcaattaggggaagaacattctgaagagattgcggcattgtatcaacgaatcgatgaattgaatttagtgcaatttattgccgcggcgcaggagctggcgttatatcccgtcaatctgagtgctgacttaatggcaaagcgttgggaacagatagagcattatgatcaaatcgtcagagattatgagccaccagccttagcggtaacgttgcatcagttttatgcgatagaaccttacccgcctatttcttttgtggcggatgaagggtcggagcctttaaatatcgatccatccttaggttgggagcaaataatagctgatacttcgcttaaactcattgctattccgggagaccactttagtttattggaagataatgagaataaaattgctttatctcaggctttaaatatggcgctggcaatcagtgatgaaggggaggtggtgtaa

SEQ ID NO: 10679 - DNA, 7155 bp, Photorhabdus luminescens
ctgctcgcgtctgcacaagcgacctttagagagatgaggagcaaaccgaaaatccaaacgctggtccaagagatcaagaaggggttccgtgaaaatggtcgcgagtggagtcccgaattgttccagcaacagaaaatgctggaacgtgcgctggagagcaacgcttattggcgctacagtaatgacagaccggtcggcatcagtcgcctcgacaaaagcgagcaacaggcatttgtcagttatatcaagacactggcaacacgcatcacaacaatcgacattttggtgcaaggcaatgagaaaacagcgctatctttgcaaacggatgacgccctaaacaatgccgaagctttccggatgctgccaaaggattttgcgcaacgttatggcacccgcggcaagcttggtgcacgactgaccatcaacgttaacaaggcgcatttcaacttgcttgcccgggcattgccccaattgttcaatgataacaatcgcggctggctggaacaggccaagatcatggggccgaaaaatctgggcagccgtaccgaccaagctgtgatctacctttccaaagccgggatcgagcatgctcaaaccatcagcgaaaagcttagcgaactgttaccggcgacagcctttgtcgaacacaccccgacaggtatgtatcgcgtgggcaagggcatttcctactctgaaacggccgcgggcggatcgagcagtcacggtcagtcccgggcacaactgattgcggcagcaggtacacagtccttgctgaccgatattccaatcgagaagaccctgacgcataccttgcagacacgcgggtacgatgtacacaacccggcgttgctctcacaagcactacgggatagcgagctcaaggggacgctggcaccaatgagtggcgattctgagcctcgtcaggtcagtgccaatatccatcagttcgccgccgatcctgtgttgttcgccaaatccaacactatcaataccgagacattaatcaggtcggggagtttcccagcagaagggaacgcccagctagtgaaaatcgaatcaggcttgtacgagctcgaatacactgatcgaagcgctaatgatgatgtagcagcaggcgctaacagcatacccgcgtattttctcgactacgacagcgccgatcaggccaatgcgtcaccagcctacgtagatattcctaagcatgcgatcgcggagagttttctatttaccgggacgctatcgggtggctcggtggtagtgaccagcctcgatgccaatacctaccgggtctaccacgatggccgagtcaacagttcactgctatacgataacgtggtgatggcagtggacgacaaagattaccgggtagctgccaccaccgacagcctcgccgtggcgtacatgcagtacgtcaatgacgaatggcaattggtgttccagcgccaagagtatcagcaagacggccagaggcttcggctaaagttacgtggcgacgaggagccactctctatccagatcgcagacagtcaagtgactgaacgcaaccaagctcaattcgccacttaccgtgagcaagttcaccaacaactaaagaaagtcgctacccaattcggggtatcagtcgaagggatcgccgacggtgtatacacagagggtgaattttctcctgatcatccagcaattgccgcgtggactaagttacatgccgaagttgacgacaagatcaacgcagatatcaagcagctagtagacaaacgaagcaaactctatgaggagcaacgcaatacctctcagcacaatctgatcgaccaacagataaaacagatcaatatcactctggagtattacaaggcgcaatacaatacggttctgcgtgaagcaggcttcgtcgaacaaagctggttatggcagcagatcaagtccaaggacggcatggctgccgtggtgcggatcgacaatacgcccatccagaacagtggactggagcacaccagtagcatcggcgagcgttatgtgatcgccgatgcttaccaacatcgtgtgcatggcaccgcgtttaccgatggtcagcgtaacttccgcgatattagcatccctggaatgtacgacaggatgtcagccttggaaatgaagatcctgtttctcaaaggccagctcactcccaagcaacaaagtgccttgagtgctcacatcactgaaaccagtcaagcagaatacatcgataaggtattgaagtggacggcggtgtacagcgaggattttcaccgcgctggtagtagcttcgaccgtctggtgccacaggacttttacctgtcgctggtcggcgacaagtccggcggccgttgctatcccttggtccgggcgatggcggtggcgctggctaacagcggcgaagcgggtatcaacaatctggtggaaaaactgtttctggcagccgccgatccccacgcaggtagttccacgctgctgaaaaacagtctgatcaaattgcactccgataaccttgaggccgtacaggcgtcaacaacaagaggacaggttacattgtccgaagtggtttccctgctgaaaaaggcgaccaagacctcgacgttcgcgctcaataccccaaatcactcgatgatggtaggaagtatggtcggactcgaaggacgtcgttactatttctatgatccgaatgtcggaatttttgccttcaacaatacaagccgcttcctcgaagccatgaagcaccacttggtgggacgcaagctagcagctcactacggttcgcttggcgacaagttgacccctatcttcaacttggtggagatcgatgccagtaagatggcaaaagtgccggtgggtaacgatctgaacgtggccgacctgactcgccccgatgaactcactacggtcatagagcaacggcggcaggttgagcaagcggttaacacccaagtacggattgccaaggacacccggttgcacactgcattagcgaccctcgatgccgaacagtggggatcaaggttcgccgaggccagtacacggatcgcccaagaaaacaaccttgatcagcgctggatgccagtgattggcaataccgaggaccaaggcaaaggccactatcgaatccagttcatcaatcgcgaccaacccgaggagacccgttgggtgagcagcggcgatgccacttttatcgaattccgccgctttgtcgatgaacatgtgctcaccctaggccaacatttcaccttcgaacacggccagatacagcccaaaggcggtatcggcgaagcagctccagttgatgggctaaacgccgggtttgcgatacagtcattgatccaatggtttaccgacaagaaccgcaatgatgcggcacgtgggatcgcttcgcctgatctggccaccgcgctcaaggtccacagctatctcaatcttgtccagatggctcacggtggcgtgcaggacgtgactaaggtcaccgaactggtgcgtacggcgttgcgcggcgaagtggtggccgccgaaacctcactcaaggactttacctccattctggggcacaccgtcaacgaaggcgcaggcgtgctatttggcggcgcaatggtcggtctggatgcttatgagctggctcacgctgagaacgatgtacagaaggcggtgttcggtacccagcttgcgtttgactcggctagcttcgtcacaggtacagccggagtgggggctggtttagtcggtgcctcaacagcgggtgctgtgctcggttctggaggagtgatccttggcgggctcgctgtaggctttacggcactggcgcaagcctttggtgtggtcgccgaggatgccaaggcggtaggccgttactttgatacaatcgacaaggcgtacaaaggtaatggctatcgatatgataatgagaagaaagtgctggtgcctctggccggggctgtgatcaaaacgctggatttgcgaaagcatcagatcgacttcgacagtcagtacatttaccgcacccattcaggctctaccggttcaggaagaatcaattatttcttctggatcggcgattttccaaagatggtccgtgaccgcagccaagcaatcgaggtacgcagcgggatcggttacaaggacgtttcccacaaactcgaccacagtgacagcaatgtgctgatcctgcccggtaccccaaagtccttcatcagttacgaatacatacagctccctagcgcaactacgcgtcacgatgccggttttgatgtgatccgcaggcttgaagaggataaacgattcgactacgacttctacatctttccgggggaggtgacgattcgtaggattcatcaggaatatatggcgacaccaatcgaagtggtgctcgaccagcgcaaccggcaactgatagtgcccgagctacccaaggaattgcatggctacctgcattacgagatcaagggtgccggtggcgagtacctgatcgggctgaacgaaagcgccagcgtgaagctcacgagcgatgtcccacataatctggtcggcagtgcgccgtcacgctggatcatcgacagcagccagctcgccagtgacagtatcagtgtgtcgaagaaccggctggtcgttggtggagtggtggtcgaactcgattcagatcggaaagagcaagtgctggtagtcaactgcaagggcgaggtgcgcgaagttgacttctccaacttgacaactcaggtggtaagcgaagatgcgagcaagtggcaggtgccgggctatagcatcgagcagcatctgagcgatctagccaaggcgcatcagttgcacgggcagtacgcggtggtggagaactacagatacaacgagcgaaatgtcggccgggcgttctacgacgtagccaaagaccgcatgctgttcaccgacaccccccacaaacaagccaggcatgcacaactgggtgcagtgatgggcgaccatgcctatttctacgacgccgataatgcggcggcatggcgggtagacatcgccacgggacaggtcgacgctcagtttgagccttggttcaaccagagtgcaggccagatctgtcggctatggcaagaggggaatgcggtctatctggcgcgccgttatcagctaaaagggaaggaagctgaactgagctatcggctcctcggtgaccgaatggagttggtcagtgcggtgggtgatgatgcgctactccagctttcggcccgtaccggcctgcatagtgatgagctcaaaactatactccaaggctacgagaacaatagcattcaacgtgaaactccgatgtatacgctgggcgcacggttgatccagccgaccagtgcggcgctggtcacggtgttcggcgtggatgcggctggcgtggcacatcgctactggatacgcaccggcgatggtacgctgatcaaaccgaatctggcaccaccggcggatcggaccttgcacttcgaagcacacgaacaggcccacagtgcctggccgatcccggccgacttagtgctagcgggaagtatgcctcagcccggcggcaaggaagtggaagtgttcttcttttacagcaaggaacaaaaagttctgttccgtcaggaaggccccggacagatggttctcgacgccaaccatcccagcgcattacgcatcaacacgccagcgttggctaatctggtcaatctgaacggaagcctgctcgccatcaccgaagatgggcgtgtggcccggctcgacgcgcaggggcagcttaactatgaagcggttaacgagcattggctcaaggggcgtacccactggtggcaggatctggctaacatcaccgacagcaccaccactctggcggtgtttggagtcaagggtaccgacggcaatagcctgctgccggtgtggtaccacaacggccaagtagtggtggcttcagcggcactacagggcaaatcgttgcaatttctgggattcgaaacagatggtgcctccgcgcggctcttcgaacccgaaagcggcaagctatatcgccaaccagccatgaccgcgaatgcgttagccgcggcttttggtggcaccggccagatacttagcgcctcggcacaacttccctctgccagtgagttgacacccgagttacatcttaaggcagcgcaacaagtcgataccggcatgcgcctgattacggtcaagggcgagatcttgctgcgaaccaacaacggcgaattgcagctagttggcgttgacaaaggctggcggcagaacaacctgacccacctgccacaggcactcgccaaactcgccgaccagtggcaggccaaaggggtattgaccttgcaggacaataaggagctaggctggttcgatatcggcagcggtcaggtattttggagtaatggcatccctgtttcacataatctgcgcttcgtggggatcgccgctggcgaaaaggcggcgtatgtgtacagcccgatgactcaggccctgtatcagatcaaggatggcaacgcgcagatgctcaacaagtttacgggtgtggagcgtatcggttcgtcccttctgcttcaaggtggaggcgttgacggcagcaaagacgatctgacgccaccgctcattgatggtgtcgacagcgtggtactgcatggcggagccgataacgatatctaccgcctcagcaaggcgatgtggtcccattaccatacgatagtcatcgacaacgacgaccggagccaagccttggaccgcctgatcctaccattagctgatccggaaagcatcttggtgaatcgccgcgatgacgacttgatgttaaccgattccagcaacggaacagccctgatggtacgtcaggtatttggcagtcaggctatggcccatcggcatttacaaatcgagctggaaggttcctcgtcggtgatcaacgtggatcacctggtcgaaggctttacccagcgaggttacaccaagaaaggtctggtggaactgtcttgggccagcaagcaatctgtcatcacaacccatgccgttgacgcagtaccgggggcggaaagaccgaacctagccaaactgagcggggctatggcttcgtttcctgataccggcgctgcccgcgaacacctgtcgcgaatccgtcaggcttcgcagactatgttggcaccatcactgccctcctaa

SEQ ID NO: 10680 - DNA, 2160 bp, Photorhabdus luminescens
atgtcaaccatcgaatctattctgtcggaaccgatcaccgtcgacacgtccaaggcggtagcggatggcggcctgctggccctgacccatgccgcccgccatttcaacttggcggtggaaccagaacaactaatccaccgtctcggacgcacccaaggagtctcgaacagccaagatctatgccgctgcgcccagtggatcggcctgagggcacgccacatctccacagatatgagccgtctcgataccgtgccccttcctatcctgctggatacggaacagggctggcaggtgctagagagagtcgaaggcgagctcattatcttgtatcagccaagtacgggtaagatatgtcgctatccccgaaccctcttcgcgagccattggcaaggcagcgccgtactgctagcggaggcgaccgagcagccgaaacggcagcggtttggcttcggctggttcgtgccttccatccgcaaacatgtcagccagtttaggaacgtaatcctagtgtctctgatgctacaggtgatcgccctagtaacccccatactgttcgagaacgtgatcgatcgggtactggttagccgcagcctatcgagcctgcaagtgctaggaatcgccatgttgactctggctttgttcgagcccatctatggtttccttcgttcctggctattcaccaacctcgccagtaaggtcaactcggagctctccggccgcctttaccagcacctaatgaccttgcccatgggctatttccaacagcgtcagaccggtgagatcatcgcccgagtgcgcgagatgaaccagatccgccaatttctcaccggttcagcgctgactatggtgctggatttggccttcatcggcctgtttgtcgctgtgatgttctcctacgccaccgagctaacctggttggtgctcggttctctcgtgctctatttcctgttctggctaggtgtcgggcctatactgcgtgcccgagtattgcgagagtacgagctaggggccgacaacaccgccttccttaccgagtcagtcaccggcattgaaaccatcaaaaccaacgccaccgaagccggcttcctacaccgctgggagcggcagctatctgccttcgtccgcgcctcattccgcgccaaagtggtggggatcttggctggtcagggaatcgacctaatccagaagctaacctccgccctgctactgctgtggggtgttactctagtaatggagggcaaactcagcccaggggagctggtcgctttcaacatgctctcggaacacgtgacccagccaattctgcgtctggcccaagtctgtcaggatttccagcataccctgatctcaatgcgcaggatcggcgacattcttgatgaggagggggaaagcggcaatggcggtctggcctccgtacccaagctacagggaggagtaagtttcagaggcgtgcgttttcgttacaacgaggatggtcaggaggtgttacgcaacctcaacatcgagattcatcccggcgaattcatcggtatcacagggccatccggttcgggcaaatccaccctggctcggttgttgcagcgcctctatgtacctcagcacggccaggtgttggtggatgggatagatttggcaatcgcagatccggtggcgctgcgccgcaacatgagcgtcgtgctgcaagaaagcgtgctgtttgccggcagcatcgccgagaacattcgtttgtgtcggcctcaggccagcgatgcggaagtgtatgaagcggcgactttggccggtgccgatggtttcatcaaggcgctggaccgaggctatgagacccaagtcggcgagcgtggcggccaactctccggggggcaacgccaacgcatcgccctagcccgagcactactgaccaatccgggaatattgctactggatgaagccactagtgccttggactacgagtcggaagcggcagtcatgaccaacctacaacgcattgcacagggccgcacagtgatcagcgtcgcccatcgccttaataccctgcgccatgcccatcgaattctggtaatcgaccaaggtcaggtggtcgaacagggcagccacgagcaactactcgccttgaacgggctttatgcccgactgtggaccttgcagatgaaagattcttag

SEQ ID NO: 10681 - DNA, 1389 bp, Photorhabdus luminescens
atgtcattcaagaaacacctaaaaaccgtcctccgggcttggcggcaggagcgtaacgcgcccaaagcgacgaagcgcacccgcgacgagtacgagtttcagcccggctatctggagatcgttgaacgacctcccgcgccttgggcaaggtgcacggcaatggcactgaccctgtttctgttggtggttctactctggtccatcatcggtcacctagacatccatgccaacgcgacaggcaggctgctggtatccagtcactctaaagtgattcagtcccttgaagccggcgagattgtggcgattcacgtgcgtgacggacaaagggtgaagaccggggatgtgctgatcaaactcaaccccataggcgtcgaagccgagttgaaggagctacaggagcaacttaacttcaagcggctggagatggctagactacaggctctgctaaccgatacccccattgaacatttctccgtacaggaaggtatgccacaggcacaggtcgagctggccagagagcatctggtcagcatctggaaagaggtagtcgccaatttagaaagcctggacagcgagatgagcgtcaaccaagcgagccagagtgcacgtaacgccgatatcaccgcgctggaaaagctgatgaccaatatcaaagtgcgccttgaagcccgtcgtaccttggccgccagcaagctattacccaaagtcgagctactggagcaagagaaggagaagctggagatcgaacgcaccctttctcaacagcatgccgagctggccgtcctcaaggagcaatatcaggtactgaaagagagtcgggagcgctacctagccaagacccgccgggaatattacgaccagctaaacgaaactcagaccgctatcgcggtcatgacacaacagttgataaaggccggtgagaggcggcggctgcaaagcctgcggacaccggtcgacggcgtagtgcagcagctagcgatccataccttgggaggcgtagtgcaatcggcccagcaactcatggtgatcgtgcccgatgatacccctctggaagccgaagtgatggtgttgaacaaagatgtggggttcgtgcacgccggtcagccggtggaaattaaggtcgacgcctttccctatacccgctatggcactatacggggtaaggtcgcccacatctccaaggatgcggtcaaggatgaacagctcggtttggtatttccggcacagatacagatggagcgctcctctattgcagtggaccagcatgaggtaccgctacaggcgggcatgagtatcaccgcggaaatccgcaccggtgatcggcgggtgatcgactacctactcagcccactacaacagtaccagtccgaagcattgagggaacgataa

SEQ ID NO: 10682 - DNA, 2121 bp, Photorhabdus luminescens
atgaatagggaaaatatatccgccgatgcagatacattgtcatctgcgcttaactgttgtcgattattgttgcaattagctaaaggtgaagctcaggaaccacagcctctgctctcccataacaaactgaaacctgcgataaaagagtacggcaaggcacatgatgttgatctggcattatgccgtttaaaattccccaaactgactcccaagctactgcctctggcctttcgcgacaaacagggaggatttattgtattagcgcgcctttccactgatcaggccctgatccagtctccttatgccgtttcacccgaagtactttccatcaacgagctagaagccagatggagcggggaggtgatccggttaggggaagcttccctcaggttcgatgtttcttggtttatacccgcgtttatccgccatcgccacctcctcggcgaggtgctgcttttttccctgatgcttcaactacttgccctagtcacccctctgtttttccaagtggtaatggacaaagtgttggtgcacaaggcgttgtcgaccctagaggtattggtgatagtactggtggtggttgggctgttcgaggtggtgctccgggggctacgcgaatacctttttgcccacaccgccaaccgcatcgatatcaccctagggatcaagctgttccggcacctactcggcctgcccctgctttacttcaagcaccgtcaggtgggcgctatcatcacccgagtgcaggagctcgatagcattcgtgacttcctgaccggctccatgctaaccctgagcgtggacctcgcctccacctttgtcttcttcggcgtcatggcctggctgtcgccgtccctaacctgtgtagtactggcggtattgcccctctattttctgttagcttggctgagctccaaaccactgcaacagcgcatcgaacaacagttccaaacggcggccctcaatacctcattcctgaacgagtccgtcagcggcgctgaaaccattaagagcctggcggtagaacccaagatgcaacggcgctgggaatcccaaaccgcaaacatggtcgaagctggtttccgcactcaaaccctcaacagcttcatcagccacggggttatgctgctacagaagacgaccggcgtcgggatcatctggctgggtgccaacatggtgatcgctctggagctcaccataggccaactgatcgctttcaatatgatggtgtcccacgtcaaccaacccatcgccaagctaatcgacctgtggcaacagtttattcaaacccgagtcgccgtcgataagctcggtgacatactcaacctgcctgtcgagcaggaacaggggaacatccggcctcagcaaccactctccggtgatctgcaaatacgcaacttggtgttccgctaccagccccatcaagccccagtattacagggggttaccttgcatatcaggtccggcgagaagctgggcatagtcggtccctccggttcaggtaagagtacgctgacccgcttattacagaagctctacgctccggatgagggggagatcttgatcgacggcactcccctacaccgactggaccccggctacctgcgtagccagattggggtggtactacaggagaactacctgttcaaccgtagcgtgcgccacaacatagcatttaaggacccctccgcctcgctggagaaagtgatggccgtcgccaagctggcaggcgcgcatgactttatcctgcaattacctctgggctatgacacggtactggccgaagccggcagttccctatcgggagggcagcgccagcgcattgccatcgcccgtgcgctgatggctaaccccaagatcttgatcttcgacgaagcgaccagtgccctcgatgacgaatcccaagcgctgatccaaaccaacatggccgagatcgcactagggcgcaccgtcatcattattgcccaccgcctgtccacggtgcgtcactgcgatcgcatcatcactttggagcagggccttatcaccgaatcaggcaaccaccaccaactactggtcaagggcggctgctacgccaagctgtggcagatgcaacaggaattacgaaaggaagcggaataa

SEQ ID NO: 10683 - DNA, 198 bp, Photorhabdus luminescens
gtggcggatgaaaagccagagttcataagcatagcaccgtcgttgggctgggaacgggtcatgcccaatacttatcttgagctgattgcgataccgggtaaccattttagtttattggaggataatgagaataaaaccgctttggctcaggcgttgaatagagtgctggcaattagttttgaaagggcggtggcgtga

SEQ ID NO: 10684 - DNA, 16374 bp, Photorhabdus luminescens
atgaaagatagcatcgctcaagcaggaagtgattttaaagctgaactcctctctcagacgtcagaaaatataaccaacgtaaatgacattttaccatcgactcagaatgtaaagaatattccccagacgttgacatccagtgaatcattttggtacgaacgtcttgctgctttgcaacccctccaattaccttttgaaaccgctggagagcaagcggaacctagttgggtaataagcgactggcagctcccattgccaaaaaacggtgaagaggaaccattacaaacattgttgcaggcgttcgttatctaccttgcgcgtttgactcagcagactacatttcaaattggttggtgtgtggatggagtaaacgataagtcggcagatttggcaccggtggtgccaatggtcgttgagctggagtttgataagccctggcatgtggtagcgaactggctggatggcgagctgtctcggttgacccggcactgcacatttagtcgaaatctcctcgcgcacgctcctgcattgtgggctattccggcgttgacaacccaccagccgtggcgaattgccgttgctgtcatagcggaggatagaccgtgtgatcagacggcaccgggcgaattgctgacgctccaactcaatgcgcagggcggttttcgctggatttacgatgaaaatcgcttgagcacggaagtgattctgcgcatgagtgaacatttacagatgctggcagcgtcaaaaaagcagggagaggaaattcctatctggcagcttaatgtgttatctgaggctgaacgaaccttactactggaaacgtggaacgccacggaaaccccttatcctgacccgttatgtattcatcaattgtttgaacaacaggcagaacaagccccgcacgccacggcgttggaatatcaagaacagaccctcagttatgcggaattgaatactcgtgctaaccggttggctcatcaattgattgcgctgggcgtcataccagaccggcgggtagcgatttgtgtagaacgctccccgatgatggtggtgtcattgctggcggtgctgaaagccggtggggcttatgtgccgttggattcaacttatccgcgggaacgtctgacatatatcctgagcgatagtgcgccgtcagtggtgctggttgatgaggctggccgggcggcgctgggtgaacaggcgctggtaggcgtgacggtacttgatccgaatatccaacttgaccagcccgacagcaatccgcaaattccggcgttaacgccacagcatctggcctatgtaatttacacctccggctcaaccgggcagccgaaaggggtgatggtggaacatcaggcgatttatcaacgttatctgggttttaatgacacctatgctgtcacctcacaagaccggctattgcaatttgccgcgtttgcgtttgatgtttcagtggaggatttcttttcgtcattatgcaatggtgccacactggttatccgggatgatagctggctggcttcgataccagaatttgttgccttaacccggcaatatcgtattacggtgatgtcactgccgaccttattctggtctgaactggcggctagagataatggattaccgctgccggattgtctccggctcatcatcattgggggtgaggcggtgaaaaagagcgccattcaggactggtttagacaggcaggtcaccggccccggctgttgaatggttatggcccgacggaaaacaccgtgacggtgacctataaggatgtgttatccccggaggatgcccgttctatcggcagaccggctaaaaatgcccgtatctacctgttggacaaatatggcgaattggtccccgcaggctgcgtgggagagatgtatattggtggcgtgggggtggcacgaggttatctgaaccggccggcgttgagcgtggaacgttttatgctggatacttttagtccggtatccggcgaacggatgtatcgctctggggatttggcccgttatttgccggacggtgatctcgaattcttgggccgtaacgatgagcaagtgaaaatccgtggttttcggattgaactgggggaaattgaaacccgactgacggaacacccggcggtacaagaggcggcggtgttggcactggatggcgatcagggcaaacggctggtggcttatgtggaggcgaaggcgaatgagggattggctgttgatttgcgtgaatacctgagtgccattttgcctgactatatggtaccggcggcctttgtgcgtctggataccttcccgcagaccccaagtggtaagttagatcgtcgggcgttgcctgcgcccggggaaaacgattttgcccgtcagatttatgaagccccacaagggaaggctgagatcactctggcggacatctggcgtgagttattgggcattgaacaaatcagccgacatgacagtttctttgcgttgggtggtcattccctactcggcgtgcagatgattgagcgtttgcgccacctaggtttaacactgacggcgcgtgatctgttccagtcgccggtgctgtcagcattggcgcaaacgttgggacagcatcaggctgtgatagtcccgcctaacgccatcacgccgacaaccacggcactgacgccggagatgttgccgctgattgatgtgagtcaaactgatattgaccgcatcgtcgagcaagtaccgggtgggataaccaatattcaggatatttatgcgttgtcgccgttgcaggacggtatcctgttccaccacctgttggaacaggaaggcgacccctatctggtgctctatccggtggcttttgctaaccgctctttactggatcgttatctggcggcggtacaacaggcggttgatcgccatgacattttgcggacggcgtttatttggcaaggattatccgttccggcgcaggtggtctggcgtcaggcacggttgcctgtgacagaactgacgctagacccggcggacggtccagtcattgaccagttaacccggcgttttgatcccgctcagtatcgtcttgacttgagtcaggcgccgctattgcattttgttattgctcaggaaaccgatggccgctggtttttactggaattgcagcatcacttgattggcgaccatgaaacgatggaagtgatgcaccgtgaagtgcaggcctatttttccgggcaaggggatcgcctgcctgcgccagtgccgttccgtcatctggtggctgaagctcggcttggggtgagccaggaagcgcatacccgtttcttcactgatatgttggcggcagtggatgagccaacgttgccgttcgggctgacgggcgtgcatcgtgatggatctcagaagaccgaatctcaccggatgttggttcctgagctaaataaccgtctgcgtagtcaggcccggcgtttgggcgtcagtctggcggcgttgtgtcatctggcttgggcgcaggtattatcgcgcaccagcgggcaggagaaagtggtgtttggtaccgtcctgtttgggcgcatggccgtaggggaagggatggggttgtttatcaataccctgccgctgcggctggatatcgatgagaccccagtacgagacagtgtgcgggaggtgcatctgcgactggctgagttgctggagcatgagcatgctccgttggcgctggctcaacgatgcagtggggttgacagcggtacgccactctttagtgccctgttgaactatcgccataatgagcagccagattctttggatgaaacgatggccgggattgaattcttgggcgaacaggagcgaactaactatccgtttgtgctgtcggtggaggacggtggttctacgctgggtctgactgctcaagtcgtgcagccgtttgatccggacagcctctgcggttatatgcaacaggcattggagagtctggtggaagcgctggagcaagccccagaaatgcccgttcgggtattggacatcctgccggaagcggagcgtaccttgttgctggaaacttggaacgcgacggaaaccgtctatcctgatcagttatgtctccatcagttgtttgaacaacaggtggagaaaactccagcggcgacggcgctgatagcaggcgataaaatgttaagctatacggaactgaatacccgtgctaactggctggctcatcagttaatcgaacaaggagtttgttccggtgatcatattgcgctcctgttagagcgctcgatagcactggtggtggctcagttggccattcttaaagtcggtgccgtttacgtgccggttgatcccagtatgccggatgagcggaaaaactggctgataagtgattgttccgcccggttgctgctcaccgatacacaggctgatattccggctaacctgacggttccgctgttgcgtctctcggatcaatcagacacggacggaagagaggaagagtgcttcaaccctgatttgccgcgttccagcgccgagttagcatatatcatgtacacctccggttctaccggtacacctaaaggggtcttggtaccgcatcgtgcggtggtccggctggtcatcaataatgattatgctgaagtcggaccggatgaccgggtggcctttacggctaatccggcttttgatgccagtacatttgaagtgtgggcaccgttgctcagcggtggggcgttagtggttattgaccgcgccacgttattaacaccacaggagttagtactggttttacaggctcaccacatcacagtgctgtggctaactatcgggttatttaaccgactggcaccagagttatctccggttctgccgcagataaagatcctgattttcgggggagatatacccgacttacaggtgattgctcaggttctaaataatcgcccgccccaacaactcttgcaggcttatggccccagtgagggaaccacgtttaccaccatgtatcctatcgtggcattaacgcagggagtgacgcggatccccattggccgaccgatagccaatacacgtatttatctgttgaatgcttacggccagccagtaccgttgggggtgaccggagagatttatgtgggcggagacggggtggcttgtggttatcttaatcgccctgaccagactgctgaacgtttcctgacagatccatttagtgatcaaccggatgcgcgtatgtaccggaccggggatttggcccgttatctgccggatggcaatctggaatttctgggccgtaatgaccaacaggttaaaattcgcggtttccgcattgaaccgggggaaattgaggcgcgtctggtggaacatccggcggtgcgtgaggcggctgtgttggcgctgggtgatgggtcggacaaacggctggtggcctatgtggcggcggaagcccatgaggggttggcgatgactctgcgtgatcacctgagtgccattttacctgattatatggtgccgtcagcttttgtgcgtctggaggctttcccgttaaccccgaacggtaagctggatcgccgggcgttaccggcaccggacgaagaggcgtttgcccgtcaggtttatgttgcgccacaaggcgagatggaaattgcgctggcgacgatttggcgtgaattactggggattgaacaggtcagtcggtatgacagcttttttgcgttgggcggccactcgttgctggctgtgcggatggttgaacatctgcgtcacttggggttgacgctggctgtgcgtgatttgttccagtcgccagtgttacttgaattggcgcaaacattggggcagcacccggttatggtggtgccacccaatgtgattacgtcagcgacgacgaaaatcaccccagaaatgttgccgctgattgatctgactcaagctgagattgaccgtatcgtcgggcaggtgccgggtgggataactaatattcaagatatctatgccctgtcaccgttgcaggacggcattttgttccaccatttattggcaaacgaaggtgatccgtatctggtggtcagtcaaatggcttttgctgaccggtctctgctagatcgttatttggcggcagtgcaacaggtgattgatcgccacgatattctgcgcactgcctttatctggcaagggttgtcagtaccggcacaggtagtctggcgtcaggcatccttgtcggtgactgagctggcgctgaacccggttgatggcccggttagcgatcaactggctcgacgttttaatccccgccattatcgtctcgatttgggtcaagcaccgctgttacgttttgtggtggcgcaggagaccgatggccgctggttcttactggaattgcaacatcacctgattggtgaccataccacaatgaaagtgatgaaccgtgaagtgcaggcataccttgccggacaagggaatagcctgcctgacccagctcctttccgcaatctggtggcgcaggcccggttaggaggggatcaggaagcgcatacccgtttctttaccgagatgttggcggaagtggatgagccaacgctgccgtttgggctgacggatgtgcatcgtgatggttctcaggagatagcatcccatcggctgctgacggccagcttgaatcaccgtctgcgtagtcaggcccggcgtttgggagtcagtctggcggcgttgtgtcatctggcttgggcacaggtattgtcgtgtaccagtggtcaggagaaagtggtgtttggcacagtactatttgggcgtatggcggcgggagaaggggctgacaatggtatggggctgtttatcaataccttgccgttacggttggatatggatgatacgccagtacgcgatagtgtacaggccgtacatacccggctggcgggattgttggaacatgagcatgcttcactggcgttggctcagcgatgcagtggagttgccagcggtacgccactttttagtgctttaatgaactatcgacataatgatcagcgtgatcctttggatgaaacgatagacgggattgaattcctgggcgaacaggagagcactaactatccctttggcatgtcggtggaggacgatggtgccacgttggggctgatcgctcatgtggtgcaaccgtttgatccggaaagcttgtgcagttatatgcagcaggcgctggagagtttggtagaggcccttgagcaggctccagagacaccggtacgaacactgaatatcttgcctgaaacggaacgcaccttgttactggaaacatggaatgccacggagagcccgtatcctgaggcgttatgtattcatcaattgtttgagcaacaggtggagaaaacccctgatgcgacggcgctggtgtatcaagagcagacgctgagttatgccgaattaaatgcctgcgccaatcgccttgctcatcaactgattgcgtttggcgtaacaccggatcagccggtagccatttgcgtggctcgctccccgactatggtggtggcattgttggcggtgctgaaagccggtggggcctatgtgccgctggacccaacttacccgggggagcgtctgacgtatatcctgaatgataccgccccatcagtggtattggctgatgcgaccggacaggctgcactgggcgacgaggcgctggtcgggttgacggtactcgacccgaatatccagcctgacctgccggatagtaacccgcaggtcccggcgttgacgccacagcacttggcttacgtcatttatacctccggttcaaccgggcagccgaaaggggtgatggtagaacatcaggcggtctatcaacgttatctgggtgttaatgaacgctatgccgtcaccgagcaagaccgggtgttgcaatttgccgcttttgcgtttgatgtttcagtggaagagtgcttctcgtcattatgtaacggagccgcgctagttattcgcgacgatagctggctggcttcaatggcggaatttattgccttagcccggcaaaaccgtatcacggtgatgtttttgccgactctgttctggtctgaactggcggccagagataacgggttgccgctgccggatggtctcaggctgatcatcattggcagtgaggcggtcaaaaagaacgccattcaggattggtttaggcaggaaacctaccaactccggctattgaacgcgtatggcccgacggaaaataccgtgacggcgacctgtaaagaaatattatccccggcagatgatcgttctatcggtcggccgattaggaatactcgcgtctacttactggatagaaacaggcaacccgtgccattgggctgcgttggtgaaatgtatattggtggcgtgggggtggcacggggttatctgaaccggctggcattgagtgaggaacgttttataccggacgtctttaatccggtgcccgacgctcggatgtatcgcaccggagatttagctcgctatctgctggacggtgaattggaattcctgggtcgtaacgaccaacaggttaaaattcgcggcttccgggttgagctaggggaaattgaaacccggctggtggaatatccagcagtacaagaggcggcggtactggcgctggatgacgggcaggacaaacggctggtcgcctatgtggtggcggaagcgaatgagggtttggctgcccgtttgcgtgaatacctgagtgcagttttacctgactatatgataccggtggcctttgtacgtctggatagctttccgcagacgccgaatggcaagctagatcgccgagcgttgccggcaccgggggaagcggcgtttgcccgtcaggtttatgaagccccgcaagggaagatagaaacgatgttagcggctgtctggtgtgaattactgggcgttgagcagattagtcgatatgacagcttctttgcgttgggcggccattcactgcttgccgtgcgcatgattgaacgattgcggcgtatcggtctggggatagcggtacaaacactgttccaacatccaacactctgtgttctggcgcagtctctggttcagcatgatgaaatccgggtgcctgacaaccgtattacaccggatacgacggtactgacaccggcgatgttgccgctgatcgatttaactcagcctgacattgatcgtatcgtcggacaagtcccgggcgggatggcgaatattcaggatatctacgcgctgtcaccgttgcaggatggcattttgttccaccatctgctggagaatgaaggtgatacctatctgttaattagccagatggtttttgctgaccgggtgctgttggatcgttatttggcggcgattcaacggataattgatcgacacgatattctgcgtaccgcctttatttggcaaggattgtcagtgccgacgcaggtggtctggcgtcaggccccattgtcagtgacggaactgacactgaacccggctgatggctcagtcagtgaccagttaacccggcgttttgatccgcgttattatcgtcttgacctgagtcaagccccgttactgcgttttgttatcgcgcaggaaacggatggtcgttggttgttactggaactgcatcatcacttgatcggtgaccatgaaacgatggaagtgatgcaccgcgaagttcaggcgtatctgatgggtgaggaagagagcttgccggtgccggttcctttccgcaatttggtggcgcaggcccggctgggtatcagtcaggaagagcatacccgcttctttaccgagatgctggcggaggtggatgaacccacgttgccgtttggattgacggaggtacatcgtgacggttcgcaggtgacggagttccaccggatgctgacgagcacgttgaatgaccgtttgcgtagtcaggctcgacgtttgggtgtcagtctggcggcgctgtgtcatctggcttgggcacaggtattgtcttgtaccagtggtcagcagagtgtcgtgtttgggacggtgctgtttgggcgtatgcaggcgggggagggtgttgacaatggcatggggttgtttatcaataccttgccgttgcggctggatatcgatgagactccggtacgggacagcgtacaggccgcccatacccgactcgccggattattggcgcatgagcatgcgtcattggcactggctcagcgttgcagtagggttgccagcggtacgccactctttagtgcgctgttgaattatcggcataatactttgtcggcaacgtcagatgaactgatcagcggtattgaatttcttggtggacaggagcgaaccaactacccattcgtgctgtcggtggaggattttggcgaatctctggggctgacggctcaggtcgtgcaaccgtttgatccggaaagcctatgcgcttatatgcaacaggcgctggagagtctggtagaagctttggagcaaacgccggagacaccgatacgggccttgaatatcctacccgaaacggaacgcacgctgttactggaaacctggaacgccacggaaaccgtctatcctgatgcgctatgtattcatcaattgtttgagcagcaagtggagagaaccccagaggcgacggcgttgatagcgggcgataaaaccctaagttatatggaactgaatacgtgtgctaaccggttggcttatcagctaatcgaacaggggattcgtccggatgaccatgttgcgctcctgttagaacgatcgatagaactggtggtggcccaattggctattctcaaagctggcgctgtttacgtgccggttgatcccagtatgccggatgagcggaaacattggctgataagtgattgttccgctcggttgctgctcactgatacacgggctgatattccggctaacttgactattccgctgttgcgtctctcggataagaaaagtgcgaacagagagcaagatcatgtcaaccctaatttgccgcgttccagcgccgaattagcgtatatcatgtacacctccggctctaccggcacacccaaaggggttttggtacaacatcgtgcgatggtccggctggtcatcaataatggctatgccaacatcggaccggaggatcgggttgcctttaccgctaatccggctttcgatgccagcacgtttgaagtttgggcaccattgcttaatggtggtgctttagtcgttatcgaccgcgccaccttattgacaccgcaggagttagtgctgactttacaggagcaccgcatcacagtgctgtggctgacgatcgggttgtttaaccggctggcagcagagttatctcccattcttccgcaaattaagattctgattttcgggggagatatacccgatttaaaggtgattgctcaggttctggataatcgtccgccacaacaactcttgcaagcctatggtccgagtgaaggaaccacctttaccaccatgtatcctatcgaggcgttaccgcaaggagtgagccggatacctattggccgcccaatagcgaatacgcgtgtttatctgctggatgtttatggtcagccggtaccgccaggggtgatcggggagatttatgtcggtggtgatggggtcgcccaaggttatcttaatcgccctgagttaaccgccgaacgtttcctcgtcgatccattcagtgatgacccggatgcccgcatgtaccgaaccggggatttggctcgctatttaccggacggtaatctggagttcatggggcgtaatgaccagcaggttaaaatccggggcttccggattgaaccgggggaaattgaggcgcgtctggtagagcacccggcggtgcgtgaagcggcggtgttggcgttaggtgatgggccagacaaacggctggtggcttatgtggtggcactcgcggatgacgggctggtgaatagtttgcgtgcttacctgagtaaaattctgcctgattatatggtgccgtcagcttttgtgcgtctggatgcgtttccgttgacgccgaacggtaagctagatcgtcgggcgctaccggctccggacagtgaagcgtttgcccgtcaggtttacgtggcgccacaaggcgaaacggaaatgacgctagcggcgatttggtgtgaattactggggattgaacaggttagtcgatatgacagcttctttgcgttaggcggccattcactgctcgctgtacgcatgattgaacgcttgcgtcatttgggattgacattggcggcgcgtgatctgttccagtcgccggtgctgtcagatttggcccaaacgttggggcagcatcaggccgtcatcgtgccgactaacgtcatcaccccggcaaccacggcattgacaccggaaatgttgccgctgattgatctaactcagccagagattgaccgcatcgttgggcaaatgctgggcggtgttgccaatattcaggatatctatgccttgtcgccattgcaggacggtattttgttccatcacctattggcaaacaaaggggacccctatctattaaccggtcagatggtcttcactgagcggactttgctgggccgttatctggcggcggtgcaacaggtggtaaatagacacgatatcctgcgtactgcctttatctggcaagggctgtcagtgcccgcccaagtagtttggcgtcaggcatccttgtcggtgactgaattgacactgaacccagccgatggaccggttagcggacaattggctgagcgttttgatccccgtcaccatcgtctagacttgggcgaagcaccgttattgcgctttatagtggcacaggagactgatggccgttggattgtattgcaattgttgcatcatctgattggcgaccataccacgttggacgtgatgaaccgtgaagtacaggcttatctagacggacaggaggagagcctgccaacaccgacacctttccgcaatttggtcgcgcaggcccggctgggggtgagtcaggatgcacatatccgcttctttaccgaaatgctggcggaggtggatgaacctacattgccgttcggattgacggaggtgcatcgtgatggctcccaagtgacggaatcgcagcgaatgttggcacctgagttgaatgaccgtctacgcagtcaagcccggcgtttgggggtcagtttggcggctttatgtcatttggcttgggcgcaggtgttgtcgcgtaccagcggacaggaacaggtggtgttcggtaccgtaatatttgggcgcatggcggtagggaaaggggttgacagcggcatggggctgtttatcaataccttgccgttgcggctggatatggatgatacgccggtgcgagatagtgtacaggcagtacatcgtcagttagcgggattgttggaacatgagcatgcctcactggcgctggcccaacgttgtagtggtgtgcaggatggcattccactgtttagtgccctgttgaactaccgacataatgatcagccagatcctttggatgaaacgatggacggcattgaattccttggtgcgcaggagtttaccaactatccgtttgccttgtcggtggaggattttagtgacgcactggggctaactgctcaagttatccaaccgtttgagccggaacgggtatgcggctatatgcaacaggcattggagagcttggtggaggcattggaacagaccccggaaacgccggtacggacattgaacatcctacctgaaattgaaagtacgttgatgctgaaaacgtggaatgcgacggaaacctcgtatcttgaaccgtcgttatgtattcatcaattgtttgaacaacaggtggagcaaaccccggacgcaacagcgttagtgtatgaggagcaaacttttagttatgccgaattaaatgcccgcgctaaccggctggcccatcagctcattgcgctaggtgtagaaccggaccagcgggtggcgatttgcgtggcacgttcaccggcgatggtggtgggattgttggcggtgctgaaagctggcgcggcttatgtgccgttagatccggattatccgggcgaacgtctaacgcatattttggctgatgtttcaccggttattttattggctgatgctgtcgggcgtacagtgttgggcgagaatgtacttaccgggctgacagtgtttgatccgaatacattgtttgaccagccagacagcaatcttcagatacctgaactgacctcacggcatctggcgtatgtgatttacacctccggttcgactggcacaccaaagggcgtaatggttgaacatagacaattggtcagtcaaattacttcgctgaacacgaagtggtcgcttaacgcatctgaccgtctattgcaattttgcaacccttcttttgacgtttgtgcatcagaaatattttgcgcaataacacagggggcacaattagtcttaaggacaaatcagtggctcttgagtgcgcaggcgttttggcgtctgtgcgagtcttataaaattacctacattgcgataccggcccaattctggcggataatatcaaatgttgataaaggcgatatctatcagggcctaaggattatttgcattggtggggaagcgatacctgatcatgagttacaacgttggctagcgactcacggtgaataccctgttctggcgaattgctacggtcctacagaagccacgattaccacgacgacatcctgcctaaacgaggggatggggcaggccaatatcataggccgtccgctaccgaatacacgcgtttacctgctcgacgttcaggggcagccagtaccgttaggagtcgagggggaattgtatattgggggcgttggtgtcgcacggggttatttcaatcgtgctgaactgacagcggaatacttcctgactgatccatttagcgataatccaaatgcacggatgtatcgaaccggggatttggttcgctacttgccggatggcaatctggaattcttggggcgtaatgatcatcaggtgaaaattcggggtttccgggttgaaccgggtgaaattgaggcccggttggtggaacatcctgcggtaagtcaatctgtggtgctggcgttgggtgaagggcaggacaaacgcttggtggcttatgtggtggcgcaagcggatgagaggttggcgaatagcctgcgtacccacctgagtgccattttacctgactatatggtgccgtcagcctttgtgcgtctggatgcctttccattgacaccgaacggtaagttggatcgtcgtgcgttaccggagccggacaatgaagcgtttgctcgtcaggcttatgaagcgccacaaggcgaaacggaaatcgtattagccgcgatttggtgtgaattgctagggattgagcaggttagccggcatgacaatttcttcgcgttgggcggccactcactgcttgccatgcgaatgatgaatcttgccgccggtcggggtttgatttttacattgaatgctttgttccaattcccggtgttgtccgaattggcctctaaaatcacctcggatttattgtctcagccgcgaagcagcgctatatcggtgcgacctggcggaacagggctgccattgttctttgttcccagtggcatgggtgactattcttatgtcttcgggctggctcaacatatcccgtcgggctatccgatttatgcgctgccttggccatccatcagtgaagaactgatgttaacgatggaagagcaggcagccagaatgatcaccttgatgaaagcggtacaaccggttggtccgtatcggataagtggctactcttccggcgggatattggcttatgccattgtccagcggcttttgagtgccggtgaaatggttaatttcttggggttaattgatacgcctgcaccgcattattttggcaaagaggccatgcagtctaaacatcatttctttactgagttggctcggcagtcggggaaggcgtgcaaagaagagattgcggcgttgtaccggcgaattgatgagttgaatttggtgcagtttattgaagcagcacaagaattggcgttatatcccgcaaatctgcgtgctgatgtgatcgcaaagcattggcggcagatcgaacgttacacgcaaatagttgcggattatgaaccgtcagcattagcaataacgttgcatcagttctatgcggtagaaccttctcctgctgattcttttgtgacggatgaaaagccggaatccgtaaatatagagccgtcgttaggttgggaacgggtcatgcctaatacttcacttaagttgattgctactccgggtaaccattttagtttattggaggataatgagaataaaatcgctttagcacaggctttgaatagagcgctggcgatcagtggtaatgaggagatgtaa

SEQ ID NO: 10685 - DNA, 132 bp, Photorhabdus luminescens
ctgccggtggtagtaaaatgcgataaaaaagagtttaatgtccatgaaaacggtcagtccacattttttcgttttatgattaatgaaaacgcaacagtgataatcgaagcgctaaaagcagatacagcataa

SEQ ID NO: 10686 - DNA, 168 bp, Photorhabdus luminescens
atgccattccaaaaaaaaccatgcaggcgatttagcaccggacaaatcgctgaccgcctgaatgctcagcgtgtcggcaggctaacgtgcaacatgcccccatcccagctaaaacagatactcaccatgatgacctcatttcatcctcgtctgagtaatgagccataa

SEQ ID NO: 10687 - DNA, 4497 bp, Photorhabdus luminescens
atgagcgtattaatgatggcctggctgggggccggcgctgcgctgcgcacaaccagaacagagacgacctcagcagggaatgctccgccgccgaccgaaatcagctcttctgccgatacggtgctaaattatctggaaagtgagcgttttcagtatcattcgctggcggcagcaatgacgtataccgttgcgatgggcggtgcccccgccgtcctcccgctggtcgcaggagtagccgccgggaagttgggagttcagataggcaatgatatcggcgaaagccttacgcatggcgtgatggttttttttggccggcgtacggtcgccaccgaaggccaggccccggcccggctcggggatgcgattgcccaccagaacaaaagcgccggcttatggggagcgctgggcggcgtgttgctcggcgcgctggcggcggtggccgtcggcgggttaattgtggcaaccggcggtctggcgatggccgtagtcgccggggcggcggccggcctggcgggcggttttgtcggcggactggtctcatccgtgggcgcggcactcgggcagtacggggcgaataagggccagattgtcgaagggtcgccagatgtcttctttgaaggccagccggtggcccgtcagggggacaaaattgtgtgcagcgaccaccccggcccggtggtgattgccgaaggcgcgaaaacggtgtttgccaacggcaaaccgattgcccggctgggccaccgcaccacctgtgacgccaatatcaacagtgccgccgcctcgattgccctcaccccgcaaaccggtgacgccctgactatcctgaccgccagcaaccaggacctgcgctggctggtcgccattgccggcctgctcccgctaccgcttggccggaaaagcaacggcggcaaagccaaatccggggcggaacccaccccgtcggtgaaaaaaaccggcggtgacagccagctctgtagcaaagccggcgagccggtggatgtggcgaccggcgacttcttacaggtctggccggtgctggccctgccgggagtcttgccgctgaccctgaaccggacttaccgctccaccgccgccctgtccgggctgttcggccccaaatgggccgatgactggtcgcagcacctgcgccgcgacggcgaggaaacccatttcaccgatggcgaaggggtgatttacaccttccataccccgaaggaaaacgtcttctcggtcaacctccatgccggtcattacctgctgtacggccggcgcgacggcgaactgcgcctgttcaaccgccgcacccggcagatactgagttttgccgcggtccagggcgataaacgccgcctgtccacgatagaggaccgcaacggcaatcagaccgtctttcgttacgatgaacaccaccgcctgacccgcctcgtccatgccgacatgacgaccctggcgctgcattacgagcaccagcagctcacggccattgactggctgcacgccggacagcgccagcggctggtgacctgccgctatgataatccggggtatctggcggaatgtgacacctttcagtttcaccacctgtggcatgaatacacgccgcaggggaacatgacccgctggcatgacaccgataaaaccgatgtcactgtgcactacgataacgcgggccgggtgacggccaccaccaccccgcagggatactggcaggaccgttttgaatacgatgacgaacgccgcgtcaccacctatttcgatgccgaaggcggctgtacccgctatcactataacgccgacggcctggtgacccgccaggttgacccgctcggccatgacacccggactgaatgggatttcagtcacaaagtcgccgaaaccgacccgctgggccggaccacggcgtatgagtacagcccttacggcgagctgaccggcgtcatgtcatccaccggggacctcactgcttacgattacgacgaatacggccagcttacccgggtcactcaaccggatggtgcccgctggcaactgcattacagcgaacagggcaacctggcctcggttatcgacccccaggggcgggttgaagagacccgttacggcccgcgcggggaaatcctgcgccgggtcttgcccgatggccgcacctggcgctacggctatgaacggcaacagctcagtgaaattcaggccccggacggtgccctgacccggtttgacaccgacggcctgggccggctgctgcgggtcaccgacgcgttacatcagcagacccactaccaccccagcccgtttcatgccaacccggcgggcagtatcagcgagattggcttaccggacggcatccggcagacgattgactacgacagcgaacgccgggtctcggcggtgactgacggggaaggccggaccacccgctatacctatgacgcctttgaccggctcagccgcctcacccgcccggacggcaccgccctgacctttggctacgaccggctgacccgcctgaaaaccgtgaccagcgaaaccggcgacacctaccactacacccgtgacccggccggccgggtgattagcgaaaccgattttaccggccggaccattcattatcagtatgacgccgccgggcgtcgcctcaccgcccgttatcccaatcaccagctgctgcgctggtgttacaccgacgacgaccgcctgacccgccaggaagcgtggcaggaagaggccgaacagtgcacgttatgctcggtcaccacctacgaccatgacgcgcagggacggctgatacgggccaccaacccggacgcggtggtgacgtttgcatatgatgaatccggccgcctgaccaaagagacaattaacggacgcgccgtcagccatcagtgggacccgcgaagcggcctgcccgccggccgccagatggacaccctgcccgcggtcagctggtactacggcctcaacggccggctgatgcagtggcagctggacggccatgccccgttgcagatgcagcatgacgggctgggccgggaaatcgcgcgggaaagcgctgccggctttatccagtcacaggcctacaccccggtcgggctgctggcccatcagaccgccgggcgcagctccgactggttcaaacagaccctgtacgaggccgacccgcatttcccgccgcgcggcagcgcggtgacccgccactggcattacaccccggcctacaacgtggcctgcattgaagacacccgctgggacgagacgcgctacggctacaatgtcaacgaccaggtggtgaccacccagtttggcgggccgcgggcctgtgacgaacagtttgtatacgatgccggccagcacctgcattaccaaaaacgggtaccggaacggctcagtgaagacctgcgccagagctaccacacccagcaggcggggagggtgattcagcacggtgcctgcacgtatcgctacgatgaaaacgggcgacggacagagaaaaccgaacggcggtggggctaccggccgcggacctggcgctaccgctgggatgcgcacgaccggctgaccggctttatcagcccggaaggggtgcgctggcgttattgctatgatgccttcgggcgacggattggcaaacgacaggaggtggacgccgccggaccgccggtgaaaccaaccgcgataatcggctatgattacctgtggagcggcgagcaactgatcgaagaaacgccggtgtatgcggatggcaccgttgactatgaacagagcattcactggctgtatgagccgggtgccctgacgcctttggcccggtttgaaaaaggccagctgtactatgtggtgagtgatcatcaagggaccgtacgggaaatcctgaccgaagccggggagctgatatgggcaggacgactgctcacctggggcgagccggaatgctggccggtgctgacggtcaatgacccgcgcaacctgacgtgtaatttccggtttgctggtcagtatgaagacagggaaagcggtttattttataatcggcaccgttattacgagagtgatacgggccagtacttatcgcctgatcctctgaatcttagtggtggcgttaacccgtacgggtatgtccatgatccggtcaattggatagacccgttcgggttggcagcttgtccaacacaaaaatatgaagttagtacattcgatgatttacagagacgttctaaggtgggtgataaattagatatccaccatacggctcaaaaacatcctgcggggcaagtaattactggttatgatcctaaagtagctccatcaatagctctccctagaggagaacataaactgattcctacaatgaaaggaccttatacgggatcggctagagatttattggcaaaagatattagagacttgcgcaattatactaatgctcctccttcagcaataaaagatttgcacaatttaaataaagaaatgtatccagaagccttcactaaaataaggtaa

SEQ ID NO: 10688 - DNA, 348 bp, Photorhabdus luminescens
atgaattctcaactatttgtagatatattaaagcttgtagtaagagatgctgctatcgaagacactatctcaatacttgaatctcccccaggtagaaaaccacaaagagaactaattgaactatctgatttttataatgaaaaatcgaaggaagagaaagagataatcaataaaataataagaatagtagctgataatacattgttcggtattctttgtgttattgatggtgtacgtgcaatagaaaatgatgaaaataaaggtgagctaatattgacctataaaaaggaaagtatagttaacttaaataaaaatagtaatctgcacgatatatataatgctagttaa

SEQ ID NO: 10689 - DNA, 318 bp, Photorhabdus luminescens
atgtgcactttgccgattttagctcactttttccccgatgtcagtgccgggtttcgccccgctttttctgccagaaccgggttttatcaggaacccgtggcggcggtgcagcttgcctgcgccgctgacgcgggttggccgggtgcgggcgggccaggcccgcaggtgaaacttttcagcggggagcccccgcccgcgggggcggacggggcggagatacgtgcctgtgccgtgaatgacgaggaagcgtatcagatcaaagatgcgatctctaagctccaatctgcgttggtttactgtggatatgcaccaaggtag

SEQ ID NO: 10690 - DNA, 231 bp, Photorhabdus luminescens
ttgaaagatggttatggtgattttattcgtgattccaaaggcgttgcgattgaagcacggcaatatcattttaaagataaaaatggttctacggtaattattcaagaacacagcttagggcacgcaaaagcaacacctttacatggagcagagcctcattttaacgtcaggccacccgataacttgaatacaggtgatgttccgggaactcatggtcactataacttttag

SEQ ID NO: 10691 - DNA, 381 bp, Photorhabdus luminescens
atgaacattattgaagtcataaataacaaattcttaatttcactttttcctgaaggattaaaagatgacattcttcttggacaagttggactcgatatagcagatcaggtatcactaaatatccatgtaacacaaagaccagaaaaagaagtcgctaaatggggagtatgggggaaagattataatgtcattgttattaaaatcattggtcagtttttgagaaaagttgaaatagttaactggcaaaagatcacttcatccgaattaatttttttagaaaaaggtgatttttactctttcaatctcaaaggagacgagtggagtgtttctttggagttggaagccttaacgttccaacgatgtgatatatatagtaaataa

SEQ ID NO: 10692 - DNA, 1506 bp, Photorhabdus luminescens; identical to SEQ ID NO: 7801

SEQ ID NO: 10693 - DNA, 336 bp, Photorhabdus luminescens; identical to SEQ ID NO: 7802

SEQ ID NO: 10694 - DNA, 303 bp, Photorhabdus luminescens; identical to SEQ ID NO: 8820

SEQ ID NO: 10695 - DNA, 369 bp, Photorhabdus luminescens
atgaccggacgtttactatcaactgtcacggttggtcgttggatgagtcccgaagaacttcaaaaaatgcgtgatactggcaaagtagttcaaagtactacgggaacaacacatgttggttatccagcaaatatagatgcctttggtaaacaagctaaaccgggaacagtgtatattgaatttgatgtccctgaaaaatcattgataaaaacaaatgatgaatgggcaaaaatagtaggtccagattctttagaagggcgtttagcaaaacgtaaaggattgcccgtaccagaaatgccagaagtagccaatatagaaattaaggcacagaaaacaacagaggggataatgacagtatgcaaaaaataa

SEQ ID NO: 10696 - DNA, 249 bp, Photorhabdus luminescens
atgcaaaaaataagactatggattatatctaattacaattatcccgtgattgtaaataatgaaagtttagtagttgatattgatactgataaaagtattgctcggtttactgtatgggatgatttgtcatgcatgttagaaattcttgatgtagatactgaaaaatatatcatcaatgaaagaagagaactggcctctgacaatgaagtaattgaagcattcaaagaatttcatagcctgctaaattaa

SEQ ID NO: 10697 - DNA, 105 bp, Photorhabdus luminescens
atgcacacactgacagcgcgcgcagctgtactgcgggctgatatagcgccggacgataaacgtggccggacggtattccagtcactcactgatttcatcacgtaa

SEQ ID NO: 10698 - DNA, 1209 bp, Photorhabdus luminescens
atgttagaaaatattcagagaagttggtttgaacactatatggtgccctgtttctctcctgctaagttcatacctgttcgggccaaaggttcgaaagtatgggatcaagatggcaaggaatatatcgattttgctggtggaattgccgttaattcattagggcatgcacatcctgaattaaaggatgagttaatttatcagattgataaaatatggcatataggtaatggttacactaatgaacctgtcctgaaattagcaaaaagactggtggaaaatacgtttgctgataaagcatttttctgtaattcaggggcggaggctaacgaggcagcattaaagttagccagaaaatatgccgctgataaatatgggaaaaataagaatgagattatttcatttaaagattcttttcatggtagaacattatttaccgttacagtaggagggcagccaaaatattcacaagattatgcccctcttccgcaagaaattacgcatcttccttataataatttatctgcaatcagagaacacatttctgaaaatacctgtgcggttattgtcgaacctattatcggtgagggcggtgttattcccgcagatcctgcattcttgcaggaattacgtaccttatgtgatcgttttcaagcgctgcttatttttgatgaaattcaaactggggtgggccgtacaggatacctttatgcttatcaggaatatggtgttgagcctgatattcttaccagtgctaaaggtctcggtggcggttttcctatcggcgctatgttaacaaaacagcatatcgcagcggtttttcaacctggaacgcatggtaccacgtttggcggtaatcctctggcgacggcagttgccaataaggtgctttctattgttaatcaggcggaactgctcaccggcgttttgcaacgtcatgattacttcatggataaactatcgaaactgaatcagcgttaccaaatattcagttgcttgcgaggtaaagggctgcttttaggtgctgaattggataaagcttggcagggtaaggcgaagcaattaactaacttggcagcagaggaggggttaattgccttgatcgcgggtccagatgtgttgcgctttgcgccagcattaaatattgaatttgctgatattgatgaaggtttggttcgtcttgaaagcgccatcatgcggtttgtcggttaa

SEQ ID NO: 10699 - DNA, 1032 bp, Photorhabdus luminescens
atgatgcttttccgagctgtccggcatagtgacttaaatggggttcagtctttatctcaacgcgctggtataggtttgacatcttttcccaataatctggatcaattacgttcacgcattgcacgtagtgttgatacttttgatggaaaactggccagggctcagcagggattcctttttgtgctggaagataccagcgcgaatcgtgtggcgggtgtcagtgccatcgaagtggcggttggactggaggagccgttttataattttcgggtacaaaaaaccattcgttcatcacgtgaattggggatttataaatctattgaagcgttgactttggagcaagatcagaccggtaacagtgaattgtgtaccttgttccttgatccggaatatcagaagggaagaaatgggacatttctctccaaagcacgttttctttttatcgccgcatttagggatattttttctaaaactatattcgctgaaatgcgaggggtggcagatgagcaaggaaattcccctttctggaattcattgggacaacatttttttggcattcctttttcccaggcagattacttaaccggtattggatcgaaaacctttattgccgaactcatgccccttcatcctatttatatctccttattatctgctgaggcgcagaaggtgattgggcaggttcatgagaaaacagtacccgcgcgggcaattcttgaaaaagaagggcttatctatcaaggccatatcgatatttttgatggcggcgctttattacaggctgagattgatcggatacgtgcggtaaaagagagtcgtctcgtttctgttagtaaagccgaatcagtgaccagagacgatggtgttccttgcatcgttgccaatcagcagtttagtgaatttcgggcgcttttattgaatgtggtgtgtgacagtaatgaactttttttaacagccgcagagatgggtgcacttcaagtcagcgatggggatcaggtgcgactagttagtctctttccaaaggaaaattaa

SEQ ID NO: 10700 - DNA, 1476 bp, Photorhabdus luminescens
atgaattataaagcacattacattgggggaagatggattgaagggcagggtgagtcgataactaaattttccccgatagatcaacaggttctgtggcaagctaacagcgccgatgcttcgcaagtcagggccgcttgtcatgctgcgcgcgaggcgttttatgcttggtcacatttgcccgccagtgagcggattaaggtcattcagacatttgcggctttgctgaatgaggagaaagaaacgcttgctcgtgttatcagtcaggaaaccagtaaaccgttatgggaaactcggactgaaatacaatccatgataggtaaggcggctatttctatcgaagcgtgggaacagcgtactggtgagtcagaaacgattatgcctgatggccgtgccttactgcgtcaccgtcctcacggtgtgatggcggtttttggtccgtataactttcccggacatttgcctaatggtcatattattcccgcgcttattgcgggtaatacgctggtgtttaaaccgagtgaattgacaccgatgaccgcagaagagacggtgaaattatgggaaaaagccggtttgcccgctggtgtgctcaatctggttcagggagcacgcagtaccgggacagcattgctggaggataagcagattgatggtgtgctgtttaccgggagtgccaatacgggctttcactttcaccgcatgctcggcggtcagccagagaagatgttggcgcttgaaatggggggaaacaatgcattgatcgtcgatgcttacgacgatattgatgccgctgtttacaccattgtgcaatccgcgtttatctccgctggtcaacgttgcacttgtgcccgcagattgttggtcaaaaatggcgcccatggagatgcggtgattaagcgtttggtggaggtgacagagcggatcgtaccatcccattgggatgcccaaccccaaccgttcattggtggagtcatttctctacaggctgtgcagaatctattggaagctcaagatcgactacaaaaactgggtggtatctctttggtttcgctggagcaatgccagccgcaatcaacgttgttgacccctgggattattgatgttagccaagtcgctgatgttcctgatgaagagtatttcgggccgctgctcatgcttatgcgttatgacacatttgatgaggcgctggcaatcgccaataacacccgattcggattggctaccggtttaatttcgccggatgctgctctgttccaacgtctgtcggaagatgccagagcgggcattgtgaactggaataaaccgttgaccggggcttccagtaaagcgccttttggtggcattggtgcgtcaggaaactaccgacctagtgcttattatgctgctgattactgtgcctggccgatggcatctctggttgctgacgaactcactttacctgaaacgcttgcgccagggcttcatttccctgattaa

SEQ ID NO: 10701 - DNA, 1344 bp, Photorhabdus luminescens
atggctggttttgaagcaaattttgatgggttggtcggcatgacccatcattatgcggggctttctgtgggtaataaggcttcgattaataataaagacagcgtatctaacccgcgtaaggccgcgctgcaagggttgatgaaaatgaaagcgttggctgatgaagggtttattcaaggagtgcttccgccgcaacaacgccctcatattccggccttgcgtaatttaggttttgtcggcagtgatgagcagatattgcataaagcagccaaatattctccggtgttattatcaaaactgagttctgcttcatcaatgtggaccgcaaatgcggcaaccgtgtcaccttcggcggatagcgctgatcagcgagttcatttcacggtagctaatttaaacaataaattgcaccgttcgctggaaatagcaacgacgactgccgcgttaaaagccacttttgctgatcaaaactattttgttcatcatcaggctcttccacaacatgaagattttggtgatgaaggggcggcaaaccataatcgcctcggtggtgattatgattcgccgggcgtacaggtgtttgtctatggccgtagcgtatttcgcggcggcccggtgcctaaacgttatccggcacggcaaacattggaagccagtgaagcgatcgcacggttgcatcggcttaatccggcacaaaccgtttttgtacagcaaaacccggtcgccattgacagtggggttttccataacgatgtgattgcggtcagcaaccgaaatgtcctttttcaccatcaatatgcttatcttaatcagtctcaggttctgaccgaaattagacagaaaatggcggtgttgggacagaattttgtctcgattgaggtgcctgctgagcagatcagcatcaaagatgcggttgattcttatctctttaatagtcagttactgagtaaaattgatgggaaaatggtgctcgttgttcctgaagagtgccgccaacattccgctgtctgggattatttgcagtcgctgagtgcacaaacctctgcacctatcaatgaagttcgtgtttttgatttgcgggaaagtatgcgtaatggcggcggcccggcctgtttgcgtctgagggtggtacttaacgacgctgaatttcgtgcggttaatcccgcaacattgatgaatacgcaactttaccagcgcctgaccaaatggatagagcaccattatcgtgatgaattatgcgccagtgatctggccgatccccaattactttgtgaagtttataccgcgctggatgagcttacgcagatcttgaatttaggatcgatctatgaatttcagcgctaa

SEQ ID NO: 10702 - DNA, 978 bp, Photorhabdus luminescens
atggatctgttaacgttattgcttgaaaaaaaacttgccgaccacctgacatttccagaaacaataaatgcgcattggttggctgaaggtgtactgcaattgattccccatgaagagggaaatcggtctctggtgatttctgccggtattcatggtaatgaaaccgcgcctattgaaatattgattcagttacttgcacagttggcggagggcacgttagcactaaaaaataacgtgttgatcatcttcggtaatttgcctgcgatgcgtacgaatcgacgttatttacatgatgatttgaatcggatgtttggtggccgttatctgaattttccgttaggaaatgagcgatcacgtgcggctgaacttgaaaacgttgtgaatcgcttttttgctgaaccttcggtgtcgtcgaccaatattcgctggcatattgatctgcataccgctatacgcgcttctcaccatgagcaatttgcgttgttacctgctcagaatcgccccttttctgctgaatttatgcaatggttgcatgacagcgatattgatgcgctcgtttatcatcgtgagaaagccgggactttcagccattttctgagtgaaaagtttggcgcggatagctgtacgatggagatgggtaaagcaatgccttttggggaaaatgatttaacaagatttcaaaaaattaccgatgcgctttatggtttaatttctttatcgcaaataaccgcacgtattaaatttgagctgaaacattaccaggtaattaattccattattaagagtcacgacagttttcaacttcatattcccgcagataccttgaactttactgaattgccagaaggatttgaaatcgccagccaacatgatcaccattggaaaattaaatttccagcgaaatttattttatttcctaatgctgaggttgctaatggattacgagcaggattgttacttgctttaaataaaaaataa

SEQ ID NO: 10703 - DNA, 1455 bp, Photorhabdus luminescens
atgataaaaaataataaaactcaacaaaacctttcggcagagaaatttgctgatacacaaacgcttcatcgagggctgagtgcacgtcatattcaattgatttccattggtggtgctattggcacaggtttatttatggggtcaggaaaaactattgccgtatcgggtacatcgatcattattacctatgcgattgttggtttttttgtctatatggtgatgcgggcaatgggagaattgctgctgactaaactgaattatcgctcttttgctgatttcgtatcggattatttaggtaccaaagccagtttttttctcggctggacttattggatgagttggattgtctcttgtattgctgatgttgttgtatgtggcggctacattcaatattggtttcccggcgtctctctttgggtgcccgcatttataacgctaggtttactggggacttgtaatcttctttctgtccgcttatttggcgaagctgaattctggttcgccatgattaaggtcattgcgattttagcgttgattattattggcgttggtatggtgatggtaggttggcaatcaccggatggtacgatcgcctctgtgaataatttgactgatccatcggtatttctgccaaatggtatttttggtttttttgctggttttcaaatcgcgattttttcttttactggtgttgaattagttggcacgatgacggcagaaacaaaagatccggaaaagatattgccgaaagcaattaattatatcccgatgagaattatgattttctatattttctccatgttgagcatcattgctgtcacttcttggggacggatctcagctgaaaccagcccttttgtgacactatttgccctggcgggtctgcctgctgctgccgcagtggttaattttgttgcattaacgtcggcaatgtcctctgctaatagtggattatatgcttgtacacgtatgctttatggcttatcaacggaaaagaatgcacatcggaaatttaaaattctttcccgcaatacggcgattcctgtacatagtctgatattttcttgtttctgtatggtggtgggtacgtcacttttatttatcgtaccgaatgtcatgcagttatttactattgtatcaaccgttgcttcggttatggtgatttatagctggtgtgtgattttgattgcctatttggtttatcgtaagaattatcctgatgtgcataaacgttcaatatttaagatgcctttaggggtgttaatgacttggctgaccctgatttttttcatctttaccatagtggtaatggtttttgatccggataccctgatcgcactctgtggcacgcctttatggtttattatgttaagtattttatggcgcgtaaaaaagaaaaatgaggcacagaaagaacagcgttatcagatagcgaaagagagttttcgttcatag

SEQ ID NO: 10704 - DNA, 885 bp, Photorhabdus luminescens
atgcaacaagttaacatctcaaacagccaccgtctggttcaatctgaggctgaattactcgaccttattctcaccgaagtgactaatgcaccacatccggatctcgttattatggcagggcatttcatgctcttccttgacgaagaccgaggatgccttgtcccgggagtcatcgaagaaaatacggctcctatgcgagaaaaaattgagcgacgcgtaggaatctttcctggatacacttgggaacttggtgtgcgaatcgcagaacagcttgaacatcaattcgaagcgataaaattcctgctgctcatcaacgattggcaatatgtttcgcgcgacagcgggccagcatctgagctaagacgtgccttctatgagcaattctccgcgcttccggcttcgtacaaatctatcttagagcgcagtgggcaattttctgagcaaaacatgctcgcaagccggaaacatcctgttgcctatccagagacttggctgaaatatcgcttccagaaaagtgccgataagttggtcaaagcagggctgttaaatcgccgcgttctcgacaatggccccgatgccggaaccgaaatttcgcttgtggacgaaaacggcgattataaacctctcattacctgcggcgttaccggatgtgcgggagagattactgagatgatctccgaggtctacaaggcgcaacatcgccttctggtgatctttgcccccggcgaatgcttccaaccagtcaaaacaggggtaagcacggcgctctctctgtatgggctttcgggcatgaaggtgattgttgcggatcccggtggaagcggagagatgcagacacaagagatctactcgaagctcgttaacgttgccgtcttcacttcctga

SEQ ID NO: 10705 - DNA, 1167 bp, Photorhabdus luminescens
atgggagtcgctatgaatgtcaatgaaaacccgactggcgtaatctatctggatcattgtgctacgacaccatgctttcctgaggtcgtcgacatcatgcgattctacatggagcatgaattcggtaattcttcctccgcccatgtgatgggacgtcgtgcccggcatgcgatagagaacgccgcccaacaagttgcgtctctcatcggtgctcgcccagaggagattgcctttacatcgggggccacagaagccaacaatattgcgcttttctcaagttttgctcataacgaatgcgctcctgcgggagcgctgctttgccctatcgaccacaaatctgtgttgcttgtcggcaaagagttgagtcgtcgggggcttgctgttgaatacctgccggttgccgccaatggccgggtacaaccggaagatgtcatcaccaaattgaccgccgacacccgtatcgtcagcgttgctcatgtgaattccgaattaggtacagttcagccggtggatgaaattgccgcgatcacacgtcggtcaggcgcttggctacatgtggatgctgtccagtctatcggcaaaattcccgtgaacgtcaaagagactggaattgatatgctttcattttccgcccacaaaatgcggggaccgaaaggagttggggcgctcttcgtcgatgcgcgtgttgcggggcatttgaggcccttcatctatggtggcggccagaatcatttgcgcagcggcaccttgccaacgccgctgattgttgggtttggccttgcgtgtcagatgattcagtcaacccttattcaacgtcaagcaaaagtcactgcattgagagactattttattactcgccttcatcaaagggtgccgaacgccgtgttgaataccgatatctcttgcagttccccatacatcgtgaacgttcagttcgaaggtatcgcttcggaggcgctaatatccgggttgcatcaggtggctatatcgtcaggttcagcctgcaattccgcggaactacagccttcgcacgtgcttacaggcatcggcttgagctcggctcaggctaatgcgtcggttcggttctgttttgatccggatctcgataatgcgatattggacaccgcaattgaacaccttgtcttccgattaaattctattcgctag

SEQ ID NO: 10706 - DNA, 825 bp, Photorhabdus luminescens
atgactatgcaaacttcctcctcaagcgcaggcactggtttttacgaacgggctttcggtagtttctctgcggaagcggtatccgaggtacgcaaagagacctatggcgaagacttggggcagaacaactggtcctctgctgatgagtttagaaagttctcccaatggcttcaattatctgacagctctcatgtgctggatgtatgcagtgggtccggagggccggctctgtttttggcaaggaccagtggctgtagcgtgacgggggttgacattcatcctcacggcctccttactgcccggcaacttgcggcagatttcggactggaagatcgaagcaacttcgtcgacagtgatgttcgtcagcctctgccatttcctgatggcacttttgatgcattatggtgtatcgactcggtaattcatattccggatcgattggccttgctgcgcgaatggtgtcgactactgaaaccgggcggccggttcttgtataccgatcctactttagtaaccggcatgctgagtaaagacgaaatcatgatacgtggcatgccgggttatttcctctatagcccgcttgggttaaacgagcgtttaatcagcgaggcgggcctttgcctcgaaaggcaggtggatcttacccaaagtgttgttgaacttagtgagcgctggcgtgccgggcgtgagaagcgcagggagcaatttattgcaatagagggtgaagaagcgttcgagcggatgcagaatttcttgtccaccacacagctagtctcaattgaacggaggctgtcgcgcgtggcctttattggttatcgtccgtaa

SEQ ID NO: 10707 - DNA, 630 bp, Photorhabdus luminescens
atgattttaaataaaaaagttttcctgatttccccttttttactcgcaatgagtagttttagtatggcatgtaagacagatccaaagatagaaaaaataatcaataaaaatggactggaaaataccaaagtgatgtctatgtataaaaattgcacactttcagtttcagcagatacaccgaataaagtgacattagtaaataataaagcggcaaatcgtgatactaaagcagaaaaggcgatgtactggtatagagggatgggaataaaggaatataaagcatttcaccagaataagtataaaagccttccttgtgttaaaggagaaaatttttgtggaattgctcccgaatatacttattctcaaggttatctgacaaataaaaaccctggcgttgttgttgagtttagtacaatagaaccgggatggttatataatgaatttacaactaaacataagtgtcaaattaaagcagagggaggaggaacatacgggcttggtgtgatagggacatcagcgagttgtgataataaatataagaaacttgtaatagggaatgtatttaataaatggttggaaaagccagccaaaatagatcccatcatttcttatgtattattagcaaaatag

SEQ ID NO: 10708 - DNA, 645 bp, Photorhabdus luminescens
atgagttttaataaaaaagcctttctgattgccactttattagttgtgagccactttagtatggcatgtaatactgatccaatggtggaacatataataaaaagttatggcctacaagagactaaagtgatgtctatgtataaaaattgtgaattggatgtggtgaataccggaaatagaattatattaactaataacaaatctaaaaataggaatgaacgtgcagagatagcgatgtactggtatcgaggaatgggaatagaagaatttaagttatttgatagtaataagtttaagagtattccttgtgttaacgtgccaaatcgcttttgcggaatttctcctgaatatacttacgccaagagctacccgatgagagaagataaaaaattcgttatagagtttagtaccgtagaacctggctggctatataatgaatttaccactaaacataactgcgaaattgatgttgaatcaagaggagaatcatatgggttgggtggaataggtgcattgaaaaaagataagtcaaattgtcagcctaaaggttataaggtaggagatgagtttaataagtggctatcggaaaagccagttaaaatagaggcgataattgcttatatacaattacccatatcagattaa

SEQ ID NO: 10709 - DNA, 1014 bp, Photorhabdus luminescens; identical to SEQ ID NO: 7370

SEQ ID NO: 10710 - DNA, 675 bp, Photorhabdus luminescens
atgagtttgaataaaaaagttttcctgatttccccgtttttattagcaatgagtagtttcagtatggcatgtatgcaagatccagaaaatattagaaatcaggtaaaagacgcaatagattataatggattgagtaagactaaagtgatgtccatgtatggaaattgcaaacttagagcgaatgtgaaaaattttgaaaagagaaatgacattgagttaaataatacttctacttctactcataatcaggatgatgaggctgcgacagcaaaatattggtatagagggatgggaaaagatgaatatatattattagaccgcaatggatataatgcaatcccttgtgttacagaggcgagttattgtggaattacacctcaatatacttatgcaaaaacatatccgacaagtgaaaagcctaaaattactatagagttcagtacagaaggatttggttggttatataacgaatttacaactcaacatcagtgtcaaattaaagcggaaggtggaggttcatatgggcttggtagaacaggaacatcgggtgatagagtgagtagctgtaagcctgctgaatatagggtaggggttgaatttaaccgatggttatcaggacataaaatacaagctcaagtttcttatgtattgctaccgaaaaaaccaaaaaaatag

SEQ ID NO: 10711 - DNA, 657 bp, Photorhabdus luminescens
atgaatttgaataaaaaggttttctttatttctccgtttttattagctatgagtagtttcagtatggcatgtatgcaagatacggaggaaattaggaatcaggtaaaaaatgcaataactgcaaatggattggcaaagactaaagtcatgtctatgtatgaaaattgcaaacttagagcgaatgtgaaagattttgacaagagaaatgacgttgagttaaataatacttctactcataatcaggatgataagatagacaaagcaaaatattggtatagagggatgggaaaaagtcaatatatatcattagaccaaaatagatatactgcaatcccttgtgttacagaaggagaaaatgactattgtggaattgcacctgcatatacttatgcaaaaacatatccgaaaactgaaaagccaaaaattactatagaattcagtacagaaggattaggttggctatataatgaatttacaactaaacatgattgtgaatataaagtggaagctggaacattatcatatgggttaggtaaaaaaggatcgaagtgcaaggttcctcctcaatataatacaggagttgaatttaataaatggttatcaacgaatgaaatacaagctcaggttgcttatgtattattaccgaaaaatccctaa

SEQ ID NO: 10712 - DNA, 2142 bp, Photorhabdus luminescens
gtgtcccgtacaattatgttaatccctactagcaccagcgtcggcttgaccagtgttagtttaggtgtcatccgctcaatggaacaaaaaggcgtcagcctgagtgttttcaaacctatcgcccagcctcgttgccgtgccgcccaagatcaaaccaccaccatcatccgcgctaattccagcataaagaccgctgaaccgctggacatggcacatgtggaatctttgctgacaaccaatcagaaagatgtgctgatggaaaagatcgtggccctttaccacgaaaataccaaagacgcagaagtcattctgattgaaggtctggttccaacccgtaaacattcattcgcccaatctctcaactatgaaattgccaagaccctgaacgctgaaatcgtattcgtattggcgctaggtaacgattccccggaacagttgaaagaacgagttgaactggctcgtgctgaatttggcggtaacaaaaaccagaacattaccggcgttattatcaataaactgaatgcgccagttgatgatcaaggccgtacccgtccggatctgtcagaaatctttgacgaatcctcaaaagccatcgtatccaacatcgatccgaacacgctgttcaaaaatagcccattgccaattctgggttgcattccgtggagttttgacctgattgcaacccgcgcaattgatatggcaaaacacctgaacgcccgtattatcaacgaaggtgcaatcaaaacccgccgtgtgaaatctgtgactttctgtgcccgcagcattccacacatgttagagcacttccgtcccggttctctactggtcacttcggctgatcgtccagacgttctggtttcagcttgtctggcggcgatgaatggggttgaaatcggtgcaatcctgctgactggcggttatgccatcgatgagccgattaagcaattgtgcgaacgtgccttcaacactggcctacctgtctttatggttgataccaacacctggcaaacttctctgaacctgcaaagtttcagcctggaagttccggcagatgaccatgaacgcatcgaaaaactgcaaaactacgtcgcacaccacatcaacaaagagtggatcgactccctgacagcgaactctgagcgcccacaccgcctctctccacctgcattccgttatcaattaaccgaactggcacgcaaagcaggcaaacgcgttgttctgccggaaggtgacgaacctcgtaccgtgaaagcggcatctatctgtgctgatcgcggtatcgcgcgatgtgttctgctgggtgatccagaagagatccgtcgggttgccgcggctcagggcgtagaactgggtgcaggtattgaaattgtcgatcccattgctgtacgtgaacgttatgtcccacgtctggttgagctacgcaaaaacaaaggcatgaccgaagtcgttgcgcgtgaacaattggaagacaacgttgttctgggtacgttgatgctggaacagggcgaagtcgatggtttggtttccggtgcggtacacaccacggcaaacaccatccgtccaccattgcaattaatcaaaactgcaccgggtagctcgctggtatcatccgtattctttatgctgctgccagaacaggttctggtttatggtgactgcgcaatcaacccagatccgactgctgaacaactgtctgaaatcgctattcaatcggcggattcagccaaagcatttggtatcgaaccgcgcgttgccatgatctcctactctaccggcaactccggtgcaggtagtgatgttgagaaagtgcgtgaagcaacccgtttagcacaggaaaaacgtccagatctgatcattgatggcccactgcaatatgacgccgcgatcatggcagatgtagcgaaatccaaagcaccaaactcaccggttgccggtcaagctaccgtgttcatcttccctgatctgaataccggtaacactacctataaagcagtacaacgttctgcggatctggtttccatcgggccaatgctgcaaggtatgcgtaaaccggtgaacgacctgtcccgtggcgctttggtagacgatattgtttacaccgttgcactgaccgcaattcaatcagcacaaggggaagcgtaa

SEQ ID NO: 10713 - DNA, 1203 bp, Photorhabdus luminescens
atgtcaagtaagctggtactggtcctcaattgcggtagctcttctctgaaatttgctatcatcgatcctgctaacggtgaagaatatctttctggtctagctgaatgttttaacctgcctgaagcccgcattaagtggaaaatggatggcgcaaaacatgaagccgctttaggtgctggtgcagcccacagtgaagcattgaactttattgttaatacgattctggccgaaaaaccagaactttctgatcaaattgccgcaatcggccaccgcattgttcacggcggtgaaaaattcacggcatccgttaccatcaatgatgaagtgattcaagggatcaaagatgcggttccattcgcaccattgcacaaccctgctcacctgattggcattgaagaagcgaaaaaagggttcccacacctggctgacaaaaacgttgctgtattcgataccgctttccatcagaccatgccagaagaggcttacctctatgccctgccatacaacctgtataaagagcacggcattcgtcgctatggcgctcatggaaccagccacttcttcgtttcccgtgaagcggcaaaaacgctcaacaaaccggttgaagagctgaatgttatcgtctgccacttgggtaatggtggctctatctcggctatcgttaatggtcaatgtgttgacacctctatgggattgacaccactggaaggtctggtaatgggtacccgcagtggtgacatcgacccagcaatcattttccatctgcatgattcactcggcatgagcgttgaacaaatcaacaaactgttgaccaaagaatctggcttactcggtctgaccgaagtcaccagtgattgccgttatatagaagataactatgcaaccaaagccgatgctaaacgcgcgatggatgtctactgccaccgtctggctaaatacgttggtgcttattccgcactaatggaaggccgcttggatgccattatctttaccgggggtattggtgaaaactccgcactggttcgtgaacaggtgatgaaaaaactggccctgttaggtttcgaatacgatcacgaccgtaacctagcggcccgcttcggtaaatccggtgctatcactactgataacagccgtcctgctttagtgatcccaaccaatgaagaattggtgatcgctcaagatgcagcgcgcctgaccgcgtaa

SEQ ID NO: 10714 - DNA, 456 bp, Photorhabdus luminescens
atgagcgcaatacctcccaccagtaatggatggctgagaaagatgcaactgggacaacaatacatgaaaacttggccgattgagaaacagttggcacccatgtttcctgaaaaccggattattaaggctacccgctttggtatccggtttatgccgccgttggctatttttactctgacgtggcaaatcgcactgggtggtcagcttggcccagcggtggcgacggcactgttcgcctgtagtttaccgatgcaagggttatggtggttggggaaacgggcatcaactccgttacccgcggcattgctgaaatggtttcatgaaatccgtgataaatttgccgcagcaggtatcacaatggcgccggtgcagcaaacgccaacttatcaatctctcgcagaactgctgaaacgcgcatttaaacaactcgatcgttcgtttcttgatgatatttga

SEQ ID NO: 10715 - DNA, 1833 bp, Photorhabdus luminescens
ttgaatagcgaactcttgtgggtattgaccctgctgctgatagctattgttctttttacttccaataaactgcgcatggatattgttgcattattggtgattatcgcgtttgtcataagtggaacgttgacgcttggtgaagcgaccagcggttttagtgatcccaatgtgttgttgatagctgccctgtttgtgattggtgaaggattggtaagaactggcgttgcttatcaaatgggggattggctggtaagagttgccgggaacagcgaaactaaaatgttggcattactgatgatgactgttgcagggcttggtgcttttatgagctctacgggagtggtcgcgattttcattccagtggtgctcagtgtcgcggtaaggatgaaaatttcgccggggcggttgatgatgcccttgagttttgccgggcttatcagtggcatgatgacattggtagcgacgcctcccaatatggtggttaacagtgagttgatacgggaagggcttcccggtttcaaattcttctctattacacctattggtatcttgattctgtttgccggtatgggttatatgctgattgctcgccattggttggcaaatcatcaatcggataaaggccatgataaatggcatcgtcgtactttccgtgaccttatccgcgactataaattatccggtcgcgcgcgtcgcctggcgatccgctcaggttccccgctgataggtctttcgcttgatgagtcaaatttgcgtgctcgctacggggctaatgtcgttggtatcgagcgttggcggcgttttcggcgcgttatggtcagtgcgatgggcaatacagaattgagagaacgggatgtgttgctggttgatatgtcagacagtgaggtggatctgcgtcaattttgcagtgagcaattattagaaccgatggtgctgcgcggggagtatttctctgaacaatctcgtaacgtaggtatggctgaagtctctctgatcccggagtcggatttattgggtaagtcactgcgggaaataggttttcgtacctgctatggtttgaatgttgttggtattcgacgtgatggtgaatcgttgtcgggtaaactggttgatgcgccactgcaacttggcgatattttgctggttattggtgactggaaactgatacgtgtcctgcaaaccaaaatgcgcgattttattgtccttaatctgccggttgagatcgaagaggtggccccggcaacgtctcaagcgccacatgcgctttttagtttggcgctgatggtagccatgatgcttaccgatgaaatacccaatgtgattgccgcattgatagcttgcttgttgatgggaaaattccgttgtatcgatatggaaagtgcgtaccgctctattcattggcccagtattatcctgattgtcgggatgatgccatttgcactggcattacaaaaaacgggtgggattgagctgattgtccgtggcttgatggatattgcgggtgatatggggccgagggtgatgctggtctgtctgtttatactttgtgccgtaattggtttgtttatttctaatacggcaacggcagtattaatggcaccgatagctattgctgctgcacgtgaaatggcagtatctcccatgccatttgccatgattattggtgtggcagcgtccgccgcatttatgaccccggtttcgtccccagtgaatacgctggtgcttggccccggtggttataagttctccgattttgtccgtttgggcgtgccgttcactctgttggtgatggtgataagcgtgctggttatcccttggttgtttccattctaa

SEQ ID NO: 10716 - DNA, 600 bp, Photorhabdus luminescens
atgattatgagccacttttttgcccacctttcccgtttgaaactgattaaccgctggcctctgatgcgcaatgtacgtacagaaaatgtatctgaacatagcttacaagtggcctttgtcgcacacgccttagccattatcaaaaaccgcaaatttggcggtaatgtgaatgctgaacgcattgcattgctggctatgtatcacgatgccagcgaagttattaccggagatttacccactccggtcaaatatcacaatccacatatcgcacgggaatacaaaaaaatagaaaaaatcgcgcagaaaaaattactggaaatgctgccaactgagctgcaagaggatttccgtccaatcttggatgacagtcagcatacaacagaagaaacttttatcattaaacaggccgattccctgtgtgcttacctcaaatgtctggaagagttatcagcaggtaaccatgaattcaatctggcgatagcccgacttgaaaaaaccctggctgatcgtcacagccaggagatggattactttatgaaagtttttgtaccgggattcagcctgtcattggacgaaattagtcttgatattccccattag

SEQ ID NO: 10717 - DNA, 1215 bp, Photorhabdus luminescens
atgctagcagttaaaaaatccagcaaattggataatgtttgttatgatatccgcggccccgtactcaaggaagctaaacgccttgaagaagaaggcaataaagtcctcaaattaaatattggtaatccagccccctttggttttgaagcaccagatgaaatcttggtagatgttatccgtaacttaccaacagcacagggttattcagattcgaaaggtctgtattctgcacgcaaagctatcatgcaacattatcaagcccggaatatgatggacgtaaccgttgaagatatttatatcggcaatggtgtttctgaattaatcgttcaggcaatgcaagcattactgaatactggtgatgaaatgctggttcctgcacctgattatcctctctggactgcggcagtttcactttccagtggcaaagccgtgcattatatgtgtgatgaagggtcagattggtttcctgacttaaatgatatccgcaacaaaattacgccccgcacacgtgggattgtgattattaaccctaataatccaacgggtgctgtatatagtaaagagctgttattggaagttgttgaaatagcccggcaacacaatttgattatttttgctgatgagatttacgacaaaatcttatatgacgatgccgagcatcattcaattgccgccctcgcgcctgatctgttaacggtaacatttaatggattatctaaaacatatcgggttgcaggttttcgtcaaggctggatggtattaaacggcccgaagaaacacgctaagagctatattgaaggtttggagatgctggcatcaatgcgtttatgtgccaatgtgccaatgcaacacgctattcaaactgctttaggcggttaccaaagtatcagtgaattcattttacctggtggccgtttgtatgagcagcgtaaccgagcatgggaattaatcaatcaaatccccggcgtttcctgcgtgaaacctaaaggcgctttatatatgtttccaaaaattgatgcaaaacgttttaatgttcacgatgaccagaaaatggtgcttgaccttttattacaagagaaggtcttgttagtgcagggaaccgcatttaactggccggaacctgaccatctccgcattgtgaccctaccaaggcttgatgaactggagatggcaattcagaaattcgcccgatttattggtaaatatcatcagtaa

SEQ ID NO: 10718 - DNA, 930 bp, Photorhabdus luminescens
atgataaatgcaaatcgtccgataatgaatctcgatctcgatctgctaagaacttttgttgctgttgctgatttaaatacttttgcagcagcagcagcagcagtatgcagaacgcaatcggctgtaagtcagcaaatgcaacgtttggagcagttggtgggcagagagttgtttgcccgtcatggccgcaataagcttcttacagagcatggtcttcaacttcttggttatgcaagacaaattctgcgcgctaacgatgatgccagcgcatcattaacctatagcgatgcagaaggtgaactaagaatcggtgcatccgatgatacggtggatacactgctcccttttttgctaaatcgcatcgcttccgtttatccacggatggcaatagacgtccgtataaagcgtactcagtttattgaaagtatgctggataaccatgagatcgatttggcactcacaaccgcaaaaattagtcatcatccaaggactgttctgcgttcaacaccggtattatggcattgtgctcctgatttccagctacaggtaaatgaacctgtgccactggttgtgatggatgaaaccaatccattccgtcagttggcgttggatacgctggatgaggtgggagtatcgtggcggattgcttatgaagcggcttctctgtcggcagttcgcacggcagtgaatgcagaagttggtattactgcccgtcctttggaaatgcaaaatgctgatctgcgtattttaggggagagtgaagggcttcctcgtttacctgaaacccagttctctctgtatagacatagtaatgagcaaaatgaatctgttctgacggtttttagtgcgatagagaataagaaaacgccatacacgataacgagtgtttctgaagaacttcctgatgatgacgatattattgatgagtaa

SEQ ID NO: 10719 - DNA, 450 bp, Photorhabdus luminescens
atgagtatgtcaacatccactgaactctttgcccatcactgggcattcgcggtatttcttttaggtgctttcggtctgtgtgctttgatgctgttaggggcatttttcttgggcgggagagcgaaagcccgggcaaaacatgtcccttatgaatctggtattgattctgtcggtagtgctcgtctccgtatgtcggccaagttctatctggtcgctatgttctttgtcatcttcgatgttgaagcgctgtttttatatgcatggtcagtctctatcaaagagagtggctggttaggctttatcgaagcaagcattttcattttggtgttactcgcaggcttgttttatctggtgcgtattggggcgctgaattggacgccatctcgttcaagccgccaggtaagtaaaccaagtgttgtgattaacattaataatagtcatccgcagtaa

SEQ ID NO: 10720 - DNA, 675 bp, Photorhabdus luminescens
atggattatacgctcacccgcatagatccgaacggtgagaatgaccgttatcccctgcaaaaacaggaaattgtcgcagacccactggagcagcatgttcaccgtagtgtttacatgggcaaactggagcatgctctgcatgatatggtgaattggggacgtaaaaactccctgtggccctacaactttggtctttcctgctgttatgtggaaatggccacatcatttaccgctgttcatgatgtcgctcgttttggcgctgaagttttacgtgcatcaccccgccaggcggattttatggtggtcgctggaacctgttttaccaaaatggcaccggttattcagcgcctgtatgaccagatgcttgagccgaaatgggttatctctatgggagcctgcgccaactctggtggtatgtacgatatttactcggtagttcaaggtgtcgataagtttatccctgttgatgtttatattcctggctgtcctccccgtcctgaagcttatatgcaagctttgttgttgttacaagagtcaattggcaaagagcgtcgtccgttgtcttgggtagtgggagatcaaggggtttaccgtgccaatatgcagtcagaaagagaacgtaagcacggggaacgtatcgcagtgaaaaatctgcgtacgccagacgaagtttaa

SEQ ID NO: 10721 - DNA, 1800 bp, Photorhabdus luminescens
atgatgatagatcagatagcgcaagaaagcgcccggcctgcgtggcaaactcatgaccatcttgatgatccggtcatgggtgagctgcgtaaccactttggcccggatgcctttactgttcagccaacccgtactggtatacccgttgtttgggtgaagcgtgaacaattactggaagtaatgactttcctgaagaagctgcctaaaccttatgtcatgctattcgatttgcatggcatggatgagcgtcagcgtactcatcgccagggtctgccagcagcagatttttctgtgttttatcacctgctttctattgagcgtaaccgcgatatcatgttgaaggttgccctcagtgaaaaagagctgaatctcccgacggcaactcctctgttcccaaatgccaattggtatgaacgtgaaacatgggaaatgtttggcgttgtctttaacggccatccaaacctgcgccgcattatgttgccaccgacttgggaagggcatccgttgcggaaggattatcctgctcgtgcgacagaatttgatcctttcgaactgaccagacagaaagaagatctggaaatggaagcgctgactttcaaaccagaagagtggggaatgaagcggggtaccgagaatgaggactttatgttccttaaccttggtcctaaccatccctcttctcatggggcattccgtatcattctgcaactggatggtgaagagattgtcgattgtgtcccggatattggttatcaccatcgtggcgcggagaagatgggagagcgccaatcttggcacagttatattccctatacagaccgtattgaatacttaggcggttgtgttaacgaaatgccttatgtgctggcggtggagaaactggcgggaattgaagtgcctgaccgggtaaaaaccattcgcgttatgttgtcggaattgttccgcatcaacagccacctactttacatctcgaccttcattcaggatgttggcgggatgaccccggtgttcttcgcctttactgaccgtcagaaagtgtatgatctggtggaggcgattaccggtttccgtatgcacccagcgtggttccgcattggtggcgttgctcatgatttgccgcgtggttgggatagattattgcgcgattttctcaactggatgcccaaacgtcttgattcctacgtgaaagcggcgctgaaaaatagcatcctgaaaggccgagctattggggttgctgcttataactccaaacaagctcttgaatggggcaccactggagcgggtttgcgggcaacgggtattgcgtttgatgtgcgtaaatggcgtccatactccggctatgaaaatttcgatttcgacgtgccgattggtaataacggcgactgttatgaccgcgtgatgttgaaagtggaagaagtgcgtcagagcttgcgaatcttgaaacagtgtctggacaatatgcctgaaggcccatttaaagcagatcatccactgacgacgccaccaccgaaagaacggactttgcagcatattgagaccatgattaaccactttttgcaagtgtcatgggggccggtaatgccagcaaatgaatctttccaaatgattgaggccactaagggcatcaacagctattacctcaccagcgacggcagtactgtgagttaccgtacccgtgtccgtacaccgagttatccgcatttgcagcagatcccatcggtaattcgcggtagcttagtttctgacctgatcgtgtatctgggcagtatcgattttgttatgtctgatgtggatcgctaa

SEQ ID NO: 10722 - DNA, 549 bp, Photorhabdus luminescens
atgcaaagtgaaattaacgcgagtgctcaacaagcgcgccttgatgtggttaacgtaacagagtctcaggcaaaagcagattttgtgctgagtaccgaagagcacgatgctattgagcatgaaaaacaccactacgaagatccgcgcgccgcttcgatagaagcattgaaaattgtacagaagcatcgtggctgggtaccggatggtgccatttacgcgattgctgatgtgcttggtattcccgctagtgatgtggaaggtgtggcaacattctacagccagatttatcgtcaacctgtgggccgccatattattcgttattgtgacagcgtggtttgtcatattaccggttatcaagatgtccaggctgcaattgaaaaacatctaaatatctgtccgggacagacgacgaaagatgggcgttttacgctgttgccaacctgttgtctgggtaactgtgacaaaggcccgaccatgatgatcgatgacgatacgcacagttctgtcagacctgaagagattgagaagttactggagcagtatccatga

SEQ ID NO: 10723 - DNA, 1365 bp, Photorhabdus luminescens
atgacagcatattcaggaataaaagaaattattcttactgaggaaaaccatcctcttacttggcgattgcgtgatgacaaacaaccggtatggttggatgagtaccgtagcaaaagtggttatcgtggtgctgaaaaagcactgaaaagcatgtccccagatgaagtggtttctctggtaaaagacgccgggctgaaaggccgtggcggtgcaggtttctctactggtctgaagtggagcctgatgccaaaagatgaaagcatgaatatccgttatctgctatgtaacgcagatgaaatggagccgggtacctacaaagatcgcttgctgatggaacaacttcctcatttgctggtggaaggaatgttgatcagtgcatttgccctgaaagcttatcgtggctatatcttcctgcgtggtgaatatgtggaagcggctgtgcatctgcgtaaagccatcgaagaagctaaagcagcgggtttgttgggtaaaaacatcatgggcagcggctttgattttgagttgtttgttcataccggcgcggggcgttatatctgtggtgaagagaccgcactgattaactcactggaaggtcgccgagctaatcctcgttcaaaaccgccatttcctgccacttccggcgcatggggtaaacctacttgtgtcaacaatgttgaaaccttgtgcaacgttccttcaattctcgaatacggcaaagagtggtatatcggcctgagtgcaggcaagagtaaagatgccggcactaaactgatgggtttctctggtcgggtgaaaaatccgggcttgtgggagttgccatttggtacgactgcccgtgaaattcttgaagattatgctggtggtatgcgtgacggcttgaaattcaaagcatggcagcccggtggggcagggactgacttcctgactgctgaacatctggatctgccaatggatttcgaaaatattgctaaagcgggcagccgtttgggcacggccttggcaatggcagttgaccatgaaattaatatggtttcgttgacgcgtaatcttgaagaattctttgcccgtgaatcttgcggttggtgtactccatgtcgtgacgggttgccgtggagcgtaaaaatcctgcgcgcaatagagcgtggggaagggcaacccggggatattgaaacattggaacagctctgtcgtttccttgggccaggcaatacattctgtgctcatgcaccaggggccgtggaaccactacagagtgccatcaaatatttccgtgatgaattcgaagctggaattgtgaccaaagactatgggaacacccatttcattgcgggtatccagtcaaacctgttaaagcagcgttggtaa

SEQ ID NO: 10724 - DNA, 2736 bp, Photorhabdus luminescens
atgctgactatggctacgatacatgtagacggcaaaaaatatgatgtagacggggctgataacctgttacaagcttgcctctctttggggttagatattccttatttttgctggcatccagcgcttggaagcgttggcgcttgccgccagtgtgcggtgaagcaatatcaaaatgcggatgatacgcgcggtcgtctgatcatgtcctgtatgactccggcaacggatggcacttttatctctattgatgatgaagaggctaaacagttccgtgagagtgtggttgagtggttgatgactaaccatccgcacgattgcccggtatgtgaagaagggggcaactgtcacttacaggatatgaccgtgatgactggtcatacattccgtaaataccgtttcactaagcgtactcataacaatcaggaattggggccgtttatttctcatgaaatgaaccgctgtattgcctgttatcgttgtgtacgttactacaaagattatgccgacggcgctgattttggtgtttatggcgctcacgataacatttattttggtcgccctgaaagcggtacgttggaaagcgagttctccggtaacctggtagaaatctgtccaaccggggtatttactgataaaacccattctgaacgttataaccgtaaatgggatatgcagtttgcgccaagtatctgtcaacagtgtagcattggctgtaataccagcccgggggagcgttatggtgaattacgccgtatcgagaaccgttataacggtacggtaaaccactattttatgtgtgaccgtggtcgtttcggttacggttatgtcaaccgtaaagatcgccctcgtcagccacggcaattgcgtggtgatcattggatctcgcttaacgctgaacaggccatgcagggtggggcggatattttgcgtcaggccaaaaatgtcatcggtatcggttctccacgcgccagtctggaaagcaattttgcactacgtgaactggtgggcgcagaaaacttctatagtgggattgctgcggctgaacaacaacgccttgatataatgctggaaattctgcaacagggtggtgtttatacaccgtcgctacgtgaaattgaaagctatgatgcggtattgattttaggcgaagatttaacgcaaaccggtgctcggatggcactggcggttcgtcaggctgtgaaaggtaaagcccgcgaaatggctgctgctcagaaagttgctgattggcagattgccgctgtgatgaatattggtcagcgtgccaaatatcctctgtttgtaaccaacgtggatgatacgcatctggatgatatcgcagcgtggaattatcgtgcgccggttgatgatcaggctcgttttggttttgcagtcgctcatgcattggataacacggcgccagccgtcgagaatttgcctgacgaattgagagccaaagtggatatggtggcgcaagcattgattggcgctaagaaaccgttaattatcagcggcagtaacgtcggcagtgatgcgattattcaagcagctgctaatattgcctgggcactgaaagaccgaggttcagatgtcggtttgtcgtttgttgcaatctatgcgaatagtattggattggcaatgatggaggcccagccactggatgttgctctgcaacgtataagtagtggtaaatctgatacggctattgtgatggaaaatgatctctatcggcatgccgcagcagataaggtagacgatgcactgaacaatctgaaaaacctggttgtggttgaccatcaacgcactgctatcatggataaagcccatttgattctgccagcttccagctttgcagaaagtgacggcacgttggtgaatcaggagggtcgggcccagcgttatttccaagttttcgaaccctctttctatgacaaatcggtggtgatgctggagagttggcgttggttgcactccttgcatacaacgtatgctgaacgtcatttggattggacgcagcttgaccatgtgattgatgcctgcgctgaagcaatgccacagcttaaaggcattgttgatgccgcgcctgattcgacgttccgcatccgcggtcagagactggctcgttcaccgcaccgttacagtggtcgtactgctatgttggcgaatatcagcgtacatgagcaacgtcagccgcaggatgtcgattcgccatttgctttctcaatggaaggtaacaatagtcctaatgcccatcgtcagcaggtgccatttgcatgggcaccgggctggaactcaccacaggcttggaacaaattccaggcggaggtaggtggtcatctgcgctttggcgatcctggtgtgcgtctgattgaaaccactgacggcggtttgaactattttgatcagattccgacagcatttactgcacaaaataaccaatggacagtggctccttaccatcatttgtttggtagtgaagagttaactcaacgttccgatgtgattcaggaacgcatgccggagccttatgtgatgctcaatagcaaagatgcggatcaattaggtgtgaaaacgggttctgttctggagtttgattgttttggtcagcaactgcgtctggcagttcgtctgagtgaaaatcttgctcaagggcagatcggcttgccaatgggaatgccgggtattcctccggtattggccggtgtttccgtgaataatctgcgggaggttgcacaatga

SEQ ID NO: 10725 - DNA, 978 bp, Photorhabdus luminescens
atgagttggttaacccccgaaattattgatgtgctgatcgctgttctgaaggcagtggtgatactggtagtggtggttgtctgtggggcattgatgagctttggtgaacgtcgtttgctagggctgtttcaaaaccgttatgggcctaatcgcgtaggttggggcggatcgttacagatcgtcgctgacatgatcaaaatgttcttcaaagaggactgggtaccccgttttgcggacagaatgatctttaccttggcaccggtgattggtttcgtttctctgttgctggcatttgccattgtgccgatcacgccgacttggatggccgctgatctgaacatcggcattttgttcttcatgatgatggcgggtctggctgtctatgcggtgctgtttgctggatggtcaagtaacaacaaatactcgttactgggggcaatgcgtgcttctgcgcagacactgagttacgaagtgtttattggtctctcttttatgggcgttgttgcgcaggcggactccttcaatatggtggatatcgtcaatgcacaagagcatatgtggaatgtcattcctcagttctttggtttcttgacttttgccatcgcgggtgtggcggtgtgtcaccgtcatccatttgaccagccggaagcagaacaggagctggctgatggctatcatattgaatattccggtatgaaattcggtctgttcttcgttggtgaatatatcggtattgtcacggtttctgccctgattgtgacaatgttctttggtggttggcatggtccgttcctgccgccgtttgtctggtttgcgttgaaaacggcattcttcatggtgatgttcatcctgatacgtgcctctttaccgcgtccgcgttatgaccaggtgatggcgtttggctggaaaatctgtctaccgctgaccttacttaacctgctggcgactgcggcagtgattttgtacaacgctcaataa

SEQ ID NO: 10726 - DNA, 543 bp, Photorhabdus luminescens
atgacattgaaagagttagtggttggttttgccacccaggtacgcagtatttggatgattggcttgcatgcctttcataagcgcgaaacccaaatgtatccagaggaaccggtttatctgccaccccgttaccgtggccgtattgtgttgacgcgcgatccggacggtgaagagcgttgtgttgcctgtaacctgtgtgcggctgtttgcccggtgggatgtatctcactgcaaaaggcggaacatgaagatggtcgttggtatccagaatttttccgcattaacttctcacgttgtattttctgtggcttatgtgaagaagcttgcccgactacagcgatccaattaacgcctgatttcgaaatgggggaatttaagcgtcaggatttggtatatgaaaaagaggagctgacgatttcaggtccgggtaaatatcctgattataacttttaccgtaagacaggtgtggcaattgacggcaaatcaaaaggtgaagccgacaatgaagcgaaacctatcgacgttaaaagcctgttgccgtaa

SEQ ID NO: 10727 - DNA, 546 bp, Photorhabdus luminescens
atggaatttacgttttataccgctgggctgattgccatattggcaactatcagggtaattacccataccaatccgatacatgcgcttttgtatctgatcgtttctctgctggcgctttcagcggtgtttttttcgctgggcgcttattttgccggtgcgctagagatcatcgtttacgccggggctattatggtgctgttcgttttcgtggtgatgatgcttaaccttggcaaatctgttgttgaacaggagcgtgtttggttgaaaccgcggacgtggattggtccgggaatactgtcaacaatgctgcttgttgtgctggtgtataccattatcaatgtttctcatggggatattgccgacaatatcacgggtgaagttgtcagtgccaaagaagtgggtatcagtttgtttggtccgtatgtattggccgttgaactggcttctttgctgttgcttgccggtatggtggtggcgtatcacattggccgtgaacacaaacagggtgaagtgctcagcaaccgaaatgcggaggaacaaccatga

SEQ ID NO: 10728 - DNA, 303 bp, Photorhabdus luminescens
atgatacctcttcaacatggactgattttggcggcaattctatttgtgttgggcctgaccgggctcatcatccgccgtaatctgttgtttatgttaattgggctcgaagtgatgattaatgctgcggctctggcttttgttgtggtaggcagctattggggccagccagatggtcaagtgatgtttattttggctatcagcttggcggcggcagaggcgagtattggcttggcgctgttattgcagctctatcgtcgtcgccagaatctgaatattgatacagtcagtgagatgcgcggatga

SEQ ID NO: 10729 - DNA, 1848 bp, Photorhabdus luminescens
atgaacttactctatttaacaattctgctgccactgctgggatttttgctgttggcattttcccgtggccgctggtctgaaaatacatcggctaccatcgggattagttctgttggtttggctgcgttggttaccttatgggtagctatcgatttcaatagtcagaatggtgcgggtgatctggtttacagtcagaacctgtggaactggatggaagttgggaatttcagtattccgttcactctggttcttgatggtttatcgcttaccatgttgagtgtggtaacgggtgttggtttcctgatccatatgtatgcctcgtggtatatgcgtggtgaagagggctattcccgtttcttcgcttataccaacctgtttattgccagcatggtgatactggttctggcagataacatgatgctgatgtatctcggttgggaaggggtagggctgtgcagttatttgctgattggcttttactataccaatccggcgaatggtgccgcagcaatgaaagcctttgtcgttacccgtgtgggtgatgtcttcctggctatcggcatgttcattctgtatgacaatctgggaacgttgaacttccgcgagttggcgattttagcgccacagcatctggaagctggttcttcggtgattacctgggcgactctgatgttattggggggagcagtaggtaaatcagcccagttgccgttacaaacttggttggccgatgcgatggccggtccaacgccagtttctgcgctgattcatgctgcaacgatggtaaccgccggggtctacttagttgcacgtagtcacggcctattcttgatggcaccagaaatcctgcaactggttggcacgatcggtgcgatcacgctggtgttggcaggttttgccgcgttagtacaaaccgatattaagcgtgtattagcttactcaaccatgagccagattggttacatgttcctggcgttgggggttcaggcgtgggatgcagcaatcttccacctgatgacccatgctttctttaaggcgctgttgttcctggcatcgggttccgtcatcttggcctgtcatcacgagcagaatattttcaaaatgggaggattgcgtaaatccattccgttggtttatgcctgcttcttggtgggtggcgcggcattatccgcgttgccaattgtcactgcgggtttctacagtaaagatgaaattctgtggggagcaatgtcacatggtcatatcaaccttatgttggcggggctggcgggtgcatttatgacctctttgtataccttccgcatgattttcattgtattccacggtgaggcgaaaacaaaagcccatcctgttaaaggtattacccatcacctgccgttactggtattgctggtgctttccacctttgtgggcgcactgattgtgccacccttggcgggtgtgttgccgggaagccatataacggatcacacaggcaaaatgaccttggaagtggtttctggtgtgatcgctgtagcgggtattttgctggcaatggcgctgtatctgggtaaacgtcagttggtgaatggtgtggcacaaagtgctccggggcgtttcttctccgtatggtggtttaatgcttggggctttgatgttctctatgactgggtatttgttaagccattcaagaacattacacatgtattgcgaaacgatccgctaaattcactgatgaatattcctgcggtgttatcacgctggagtaacaaaggtcttagcctgagtgaaaatggacaggtccgttggtacgttgcctctatggggttgggtgcagtgctggttttagctctgctgctactggtttaa

SEQ ID NO: 10730 - DNA, 1521 bp, Photorhabdus luminescens
atgctattaccttggctaattcttatgcccttcatcggtggcctgttgagttggcaggctgaacgcttcggtacccgtgtaccgcgttggatcgcgttaatttcgatggggttgactctggtgctctctctgcaactgtggttgcaggggggctacaccttggcgaatccgcaagggatccctcaatggcaagaagaatttgttatgccgtggatcccacgttttggcatcagtattcaccttgctctggatggcttatcgctgctgatggtggtgttgactgcactactggggctgatggctattctctgttcatggacggaaaatcagccatatcagggctttttccacttgaacctgctgtggatcttgggtggtgtgatgggggtgttcctcgctatcgacatgttcctgttcttcttcttctgggaaatgatgttggtgccgatgtacttcctgattgcactgtgggggcaccgaggctcaggcggtaagactcgtatcaccgcggcgaccaagtttttcatttacacccaggcgagtggcttggtgatgttaattgcgattatggcattggtattggttcactataacgggacaggcgagtggacattcagctatcaaaaactgctgaatacgccaatgtcacataccgttcaatacttgctgatgctcggtttcttcattgcttttgctgtaaaaatgccagttgtgcctttacatgggtggttgcctgatgcacacagtcaggcaccaacagcgggttctgttgacttggcggggatcttgctgaaaacggcgggttatggtctgttgcgtttcggtttgccactgttcccggaagcttctcatgagttcacaccgattgcgatgtggttcggtgtgctcgggatcttctatggcgcatggatggcattcagccagacagatatcaaacgcttgattgcttataccagtatctctcatatggggtttgtgttaatcgcgatctattctggcagccagcttgcttaccaaggggcaattattcagatgattgctcatggtctgtcagccgcaggtatgtttattctctgtgggcaactttacgagcgcttacatacccgtgatatgaatcttatgggcggcttgtggaagcgtgtgcagttcctgcctgcgttatcactctcttttgctgtggcgacactggggatgccggggaccggtaacttcgtcggtgaatttatgatcctgtttggtagtttcagtgaatttccgttaattataacgatttctgtgtttggtctggtcttcgcctctgtctatgccctgtatatgatgcagcgtgcttactacggtgaatcaaaatcagatgaaccactaagacgaatggatatgcgagaagtatccattgtaatggtgctgttgatattactggtggtgatgggtttctacccacaacctattcttgatacttcagcggcagcgatggataacatccagacctggtattcagcttcaatttcaactacaaggccgtaa

SEQ ID NO: 10731 - DNA, 1458 bp, Photorhabdus luminescens
atgacaataactcctcaacaactgatcgcgctgttaccgctgttgatcgtcggattgacggtagtggttgtgatgctgtccattgcgtggcgacgcgatcactttattaacaccactctgaccgtgataggtttgaatctggctctgctgtctctctattttgtcggacagcaagaagcgatggatgtcactccactggttcatgtggatcgctatgctatgctctatatcggtctcgtactggttgcaagcctggcaacggcgactttcgcctattcctggctagaaaattatccagataacaaagaagagttctatttactggtgctgattgcgacagtgggcgggattcttctggcttgtgcaaaccacctggcatcattgtttatcggtattgagttattaactttgccgctgtttggtttgattggttatgcatatcgtcagaaacgctctctggaagcggctatcaagtacatgctgctgtctgcggcagcctcttctttcatgctgtttggtatcgcgttgttatatgcagaatcaggcgatctctcttttgccgcactggggcatcgtttgtctgacagctatatctatcaacctttgatactgtcaggcttgggtatgctggttgttggccttggcttcaaattatcactggtacctttccatctctggacaccggatgtttatcagggagcacctgctccggtctctacctttctggcaacagccagtaagatagcgatttttgcagtagtgatacgtctattcgttgaagcaccaatggcggatagtgaagcactgcgtacggtattaaccgttattgcaattgcttctatgctgttcggtaacttgatggcactgacccagacaaatatcaaacgtctgcttggttactcttctattgctcacttgggttatctgctggtggcgctggtggcggtacagaaccaccagctttcagaagaaacggtcggtatctatctggcaggttatctgtttagcagtatcggtgcatttggtgttgttagcctcatgtccagcccatataaagggccggatgcagattccctctactcataccgtggcctgttttggcataaacctattctgtctgcggtgatgacggtgatgatgttgtcactggcggggatcccaatgacgttcggttttattggtaagttctacgtcattgtgttgggtgtgaaagcggaactgtggtggctgacgggtgccgtagttgtgggtagtgctatcggcttgtattactatctacgggtcatggtcagtttgtatctgcctgcgccgaaagcgcttaatcgtgacacaccaaggaactgggcatcgactgccggcgggatggttgttctgatttccgcattattggtattggcgctaggtatctggcctcaaccgctgattgatgtaatacagcaagcgaaaattattctctaa

SEQ ID NO: 10732 - DNA, 1062 bp, Photorhabdus luminescens
atgactgaagtcattactttccctcagaaaactatcacttatccagaaattagtgtaaaaactttgaatcaagcagtaaaaaacatctggagtttaacgcaccagcaaaaatcaggcattgaaatcatccaggaaaaaactctgcggataagcttatacagtcgagatatcgacgaagccgctcgtgcctctgtacctcaactacaaactatcctgagacaactcccgcctcaagactatttccagaccatcatcgaaattgatactgctctggaaaattcagaattggatgacgagacacgaaataccctgttggaagcacgtttagagcaagtacgcaatctgaacaaagatgttaaaaatgtcatttccagcttacatgaagaaagcaacataatgaccagcaaaattgccgatgttcgtaatgtcgttattttagaacgtctggaagagcgtctgaaagaagagcaggaaagaaaagaagaactgcaagctgatatcacgaagaaagggcaggataaggccaaattaatcccagatcgcgacaagctcatcgaaagtcaaaacattatccgtcaatataatctggccgatatgtttaaggactatattcccaatgccagtgaactggacaaattgaatctggctagccctaaaaaagaacttattaaacaggcgatcaaacaaggaattgaaatcaccaaaaagattctgagcaatatctccacaggactaaaatatgttgagctagctgatgccaggatcaaattagatcaacaaatcgctcaattaactaaagatagcgacgacttaaaaacccaattaaaaggcgcagaacaacggattgccagtatagaagatgtgcataaaatcgacaaagaacgtaccactctattactccaggcaactaaactggagcaagtatggagcatcttcgccaaccaattacaggagaccatagatgatcaagcccgtcagcaaaacctgactaaactcatacacgatcagctaaactaccttgacaatctggaatcgcaatacagcgggattctgctgaaataa

SEQ ID NO: 10733 - DNA, 1215 bp, Photorhabdus luminescens
atgttattagctcaactttcagcggaaaaaacactgaacgaaacagatattccctcggctaccttgcaattactgactggtaaacaagaaggtgttgcacgccccggaggaatatttaccaaagaagacctaattaatatcaaactgtatgttaaaaaaggtctatcactcccttttaatcttgaggaagtgaagagttacttggattatcaaaagatcgatatcgccggattagaaccagaagatattcacactttgtttgaagaaatccgcactcactcgtttagctggagcgatgtggaaaacgatattctgcaacagagcatagacctggaaattattggtaaacaaatcaccgaaacaggtgagaatatcattagcatcattaatgaaatgccaattatcacacgcataaaaaggagattaggagaaatatcggagaaacaactcgcccggatcacctacacccatgaagacagagaagtatcatctgctctaggggaaatccttgacaccatgaaaaatgatattgaaaaacagcgtgagaaaactgaaaaggtcaaaaccgaagtatccgatttcaagctaaagctgattggcggcagattgtcaaacggcagcattgcgctaggtttacaaccacaagtcgaaaataagcgaaagctgatgaaagacaataagatgtcggtcagcatcggagatctggacgataagatcatggagaaaaaagaggaaattgtccaactcaagaaagactacgataaattcgtaggcttggctttctccggtatcgtagggggactgatcggcctcgctattactggcggcatttttggttccaaggcagaagaagtacgaaaacgtaaaaacatgctgatcgaagaagtacgcagcctggaagagagcatcaaaggtaaacgcgcattacaaaaatctattactagtttatcccttgattttagcgacattgatacccgcttattggatgcagaagtggctctgaaccatttggattacatgtggcaatccatgctgacccagattaatgcttctaaagataaattcacccaaattaacgatgcactcaacttgacctcttttataactaaattccagcaagtcataaacccttggaaagaggtggaaggttccgctaaacaattagtcagggttttcgatgaagcattgaaagaatacaaacatcgctataactaa

SEQ ID NO: 10734 - DNA, 1320 bp, Photorhabdus luminescens
gtgaatcaaattgctaatgttgtcgctgatgtatgcaagactctgaataataaacaagttagcgaagttggtatccaacagatttcatttcctctgccagcaggttgcagcacttactggctggaatggctggcagcgcagtctcattatccgcagttctattggcatcacagagagggccatgaagaagtcgccgcttgtgggcaaattcatcttttcagtgatattgctttagccgaaaattttttgcagagaaaccgtcagtttccacggatacggatctgggggctgaatgcctgggatcggattcaaccagcccgtattacgcaatccgatgcaggggaagcaggttatctgtttttgccccgcatcgaattacgccgctaccgtgacgaaagctggctgtatttaaatatagctggccggcaggatatgaagaatgcacaggaatttctgcaacaattagttccgcatcaggaattctctgcattacaggcggtggtagtgaacgcggagaatgtgccggaacgcgcccgctggtgtgatttgattgagcaggctttggacactatcacccatcgtaagatggagaaggtggtgatggcgcgtaagacacaactcgaactgagtgaatctttagctgctgcacagtttatggcagcgagtcgccagataaatcactgttgttatcattttatgctagcttttaatcagcatgaggcatttttggcgtcttcaccagaacggctttacctccgtaagcagactcagctttatacagaggcgctggcggggacggttgacaattctgatgatgctcagcaagcccaaaaattggggcaatggttgctaggtgataaaaaaaatcagcatgaaaacctgctagttgttgatgatatttgccagcgtcttcaaggcgctgtggtttctgtcgatgttgctccgccagaggtgattcgtttgcgaaaggttcagcatttgcgccgccgaattcagggaaaactaaagagtgccagtgatagtgattgtttgcatcgtttacaaccaacggctgcggttgctggattacctcgtgaagcggcgcgtgattttattcgtgatagcgagttattcagtcgtgattggtatgcagggtccgcaggatatctttcctgtgaacagagtgagtttgcagtttcactacgttgcgcacaaattaacaacaatttactttcactgtatgccggtgcggggattgtgatggggtctgatccacaacaggagtggatagagatagagaataaagctgccgggctgcgcactttactgaaaggtgaatag

SEQ ID NO: 10735 - DNA, 1695 bp, Photorhabdus luminescens
atgtcaaacagcgcatttaaccgccgctgggcggaacttttattggaagctcttactcgccacggattacgtcatgtttgcattgcgcccggttcacgctccacgcctttgacaatcgctgccgcggcaaataacaaactgatttgtcatactcattttgacgaacgtggattagggcatctggcactgggattatccaaagcaagcagagagccggttgctgttatcgttacttctggaaccgcggtggcaaatctctatccttcattaattgaagccagtttaaccggtgaacgaatggttttccttacggctgatcggccaccagaattgatggattgtggtgcaaatcaggctattcgtcaaaatggtatttttgcttctcatccatgccaaacaatttctttgccaagaccgaccgtagatataccggcaagctggctggcttctgtcatagatcatagtatggcgaatttgcaacatggagccgtgcatattaattgcccatttgccgaaccattatatggtaatgaagagcctgcttatgatgagtggcagcagcagttaggtgattggtggaaaagtaaaacaccttggttgagccagccagtcgctaaggttgtggcagaagttccggattgggactgctggcaacagaaaaaaggcgttgtattggctggtcgaatgagtgccgaagagggagttaatgttgctaaatgggcaaaggcattgagctggccgctgattggcaatgcgctttcacaaactgggcagccactgccttgtgccgatttatggttggataatcctcatgtgcaggagattttagcgcaagcgcaactggtagtgcagtttggctccagcctgatagggaaatgcttgttacagtggcaagcgaaatgccagccgcaggagttttggattattgatccgatacccggtcggcttgatcctgccaatcatcgtggcaaaaaattgacctgtcatattgctgactggttactggctcatccggcacagccgtgcataccgtgggcacaatcgtgtacattgtgggcagaagagctcatcgtttggtcagaaaaagccgttaactgcgtcagaactgaattggctgggaaattcggtgaagcaacggtggcctatcgattgcgtgaattactgcctgaacgtgggcagttgtttgtcggtaacagcctgattattcgtttgattgatacactgggacaattaccggcggggtatccagtttacagtaaccggggcgctagcggcattgatgggttaatttctactgcggcaggtgtacaacgggcaacggcaaagcccactttggctgtgatcggggatttatcggcgctttatgatctcaatagcttggctctgttgcgtcatccttccgctccaatggtattaattgtggtaaataataacggcgggcagattttctctttactacccacacaggaagaagcaaggcagcgtttttactgtatgcctcaatacgttaattttgatcatgctgcggcgatgttcggcttgaaatatgccagcccacaaaattggatggaattgcaacaaagtattaaacaggcatggcaacaaaatgaaaccacactgattgagttaaaagtgccggatagagaaggggctgagtgtttgcaacaactgttaaaacaggtggctatgttgtga

SEQ ID NO: 10736 - DNA, 873 bp, Photorhabdus luminescens
gtgtttgcaacaactgttaaaacaggtggctatgttgtgagtctggtttgtcgcaagttcaacggttacaacgaccgcccttggctggtttggttgcatggattattgggctgtggtgatgaatggttgccgttagtgaatctgtgtgctcaacatccctcattggtcatcgatctgcccggtcacggtgattccactgacgtgcgggtaaaagatcttctggaaatgagttgtcttttatctgaaacattagcagaacagagaattagtcaatactggctgattggctactccttgggtggacgcattgctatgcatcatgcttgttatggtgatattcggggattatgtgggttactgattgaaggaggaaatcctgggttattttcccaacaggagcggaataatcgtcttgaacacgatagaaattgggccggacgttttcgttctcagccgattgaacaagttttatctgattggtatcaacagccggttttttctgatctattacctgaacaacgtcagcaactgatcaaagtacgccgtcataataatggcgatggtgtggctaatatgctggaaaatacctcacttggacatcaaccctggttagtgccggtattgcaacaattgacgttaccttttgtttatctgtgtggcgaaaatgataagaaattccaacatttggcaaaacgttgcgctttgccgctgcaaaccattccacgtgttgggcataatgctcaccgggcgaacgcagtggcgtttgccgcggtagtaaaccattttttatcactctttaataaggaatacgaatatgatttacccgagcgaagaagaactttattccccaattgtatggcaggactgctctga

SEQ ID NO: 10737 - DNA, 858 bp, Photorhabdus luminescens
atgatttacccgagcgaagaagaactttattccccaattgtatggcaggactgctctgaagggtttgaagatattttttatcacaaatccaccgatggtatggctaaaatcaccatcaatcgcccgcaagtacgtaacgcattccgtccattgacggttaaagagatgatgcaggcgttggataatgcccgttatgatgacaatatcggtgtgattatcctgacgggtatgggtgaaaaagctttttgtgctggtggtgatcaaaaagtccgtggtgatcatggtggttataaggatgacaacggcatgcatcatctgaatgtcttggatttccagcgccaaattcgcacttgtccaaaacccgttgttgctatggttgctggatatgcgattggtggtggtcatgtactgcatttggtatgtgatctgaccattgcggctgataatgctattttcggtcagactgggcctaaagtgggctcttttgacggtggttggggggcatcttacatggcgcggattgttggtcagaaaaaggcccgtgaaatctggtttttgtgtcgtcaatatgatgctaaacaagcgttggaaatggggctggttaatacagttgtgccatatgtggatctggaaaaagagaccgttcgctggtgtcgtgagatgctgaaaaatagcccaatggccttgcgttgcttaaaagccgctctaaatgcggattgtgatggtcaatctggcttgcaagagctggcaggtaacgccaccatgcttttctatatgacagaagaaggtcaggagggacgtaatgcatttgttgagaaacgccatcctgatttcagtaaatttaaacgtaacccataa

SEQ ID NO: 10738 - DNA, 972 bp, Photorhabdus luminescens
atgcgtactgcaactttataccggttcagattgccaatggaggccggtgttatcctgcgatatcagcggcttaaaactcgtgatggttttttggttcacttacaggaaaatggtcaacagggatggggtgaaattgcaccattgccggaattcagcaaagaaacagttgaacaggcaggtgaagccgcggtggcatggcttagactgtggcatcttggcgctgaacctgatgaaagtgaattaccttctgttgcatttgggattagctgtgcattagctgaattacagggtaacttaccggaagaggctgattaccggaaagcgcccctgtgcaatggtgatcctgatgaactgattgttcgtctcaataacatgagtggacaaaaagttgccaaagtgaaaatcgggctgtacgaagcggtacgtgacggcatggtcgttaatgttctgctggaagcggtaccggatctatctttgcggctggatgctaaccgtagttggagccgcgctaaagcggacagtttcgctaagtatgtcaatcctgattaccgcaaccgaattgcctttttggaagaaccttgtcaaacctcacaacaatcgctcgcttttgcccgtgataccgggattgccattgcatgggatgaaagcgttcgtgatgaaggttttaacgtagaggcacaagcaggggtgacggctattgtgatcaaacccactctgacaggaagccttgcccgttgttgtcagttgatttcagccgcgcacaatgtgggattggaggcggtgatcagctccagtattgaaaccagcttcggtttgactcagcttgcccgtattgctcattggctgacgccagcgactattcctggactggatacgctggaattgattcagtctcagttggtgcgccgttggccgggtagcacgatgccagtaacaagattggacgagttagcaatcgcatggcgcagttaa

SEQ ID NO: 10739 - DNA, 1401 bp, Photorhabdus luminescens
atggcgcagttaaatccattttcccagtggccgtggcgctactgggcagcgtttagccctgaaaatattgctgtcaagttgcgtgatcggtccctaacttggcatcaattagttatctctttggataccatagcggccaattttcgccaacagggggtagttgaaggtagtggcgtaatgttgcgaggaaagaacagcgaagagatgttgttttgttatcttgcggctttacagtgtggtgcgcgagtattgccactaaatcctcaattgcctgaaatgctcttggctgaattactgccacatttgaatatcgattttgtggctgatttctgtagtgataatgtgtctgtcatagatgccaaatcgcttaattggcaaagtgaaccactaaattctgctgataattcggtggaatgggatgctatgcgcccagccagtatgatactgacctccggctcttctggattgcctaaagcggctgttcactcaattcatgctcatcttgccagcgcgcaagatctactttcagtaattgaatttcagcaacgagatagctggttgctctcattgccgttgtttcatgtatcgggtcaagggatcatttggcgctggctaatcaaaggagcttctttagtgctcagaaatactcatctgttagatcacgctttagccgattgcacccatgcgtcattggttccgactcagctttggcggttactggaacagtcacaaaatcagtccctgaatttgaaacaagtgctgttgggtggagcaatgatccccattgaattgactcaaagggcggagcagcaaggtatttgctgttggtgtagctatggtttgaccgaattggcttcaacagtatgcattaaacgggcagacgatcttcccggtgtcggtaatcctttaccgggcaaagaaattcggctgataaatgaggaaattcagattcgttctggcagccttgccaatggatattggctggatggtaaattacaaccgttagctgatcgtgatggctggtttcatacccgtgatcgaggtgtgatacaaaatgatgagttgcggatacttggccggatggataatcaatttttcagcggtggagaagggattcagccggaagagattgaacgggtgattaacacctacccgcaggttgcacaaaactttattgttcccgtacctgaccctgaatttggttatcgtcctgtcgcggtcatagatagtcactccactgaagttatcgacttattaccggaatggttgattgataaactggctgcttttcagcgcccggtcgcttactatttgttacctcaaaagtttaaaaatagcggcattaaaatttcccgtcagcaaatcaaaaaatgggtgttggatttgccaagtttatattga

SEQ ID NO: 10740 - DNA, 1443 bp, Photorhabdus luminescens
atgaaaaagagagggcttacaacgaatgctggtacccctgtcgttgacaacaataatgtcatgactgcgggtcaacgtggtcctatgttgttacaagatgtttggttcttagaaaagcttgcccattttgatcgtgaagtgatcccagagcgccgtatgcatgccaaaggttctggagctcatggtgtctttgtggttactcacgatattactaagtacactcgcgctaagattttttctgaaataggcaaaaaaaccgagatgtttgcccgtttctcaactgtcgccggtgaacgcggcgcagcagatgctgaacgtgatattcgtggttttgcgctcaagttctatacggaagaaggaaactgggatttagtcggcaacaataccccgatattctatctccgtgatccactgaagttcccggatcttaaccatgttgttaaacgcgatccccacactaacttacgtaatcctgcctataagtgggattttttctctcatcaacctgaatcactgcaccaattaacgattgatttcagtgaccgtggtgtacctaagtctttccgccatatgcacggttttggtagccatactttcagctttatcaacgcagataatgaacgtttctgggtgaaattccatttccgttgtcagcaaggcattaaaaacctgatggacgaagaagcagaagcgctggtgggtaaagatcgtgaaagttctcaacgtgacttgtttgcagcaattgagcaaggagattatccacgctggaaattaaaagtccaaatcatgccagagaaagaagctaacttgttaccgtacaacccgtttgatttgaccaaagtctggcctcacggcgactacccaatgattgatgtcggttatttcgagctaaaccgtaatcctgataactatttctcagatgttgaacaggctgctttcaaccctgctaatgtcgtgccaggtatcagtttctcccctgataagatgttacaaggccgtctgttctcttatggtgatgctcaacgttaccgtcttggcgttaaccaccatcaaattccggtcaatacacctcgttgtccgttccataattaccaccgtgatggggcaatgcgtgtcgatggtaacagcggaaacaccgtgacttatgaaccaaacaatgcaggattgttccaggaacaacctgaattcaaacacccatcattgtctttagaaggagatgccgatcactggaaccatcgtcaagatgaagattatttcagtcaacctcgtaaactgtttatgctaataaacagtaaagagcatcaacgtatgtttgaccgtattgccagtgaactgtcacaagcacatgaagatactcaacgccgtcaggttgagctatttagaaaagttcatccagaatatggcgctggtgttgaaaatgcgctgaaaaaaatcaaagggtaa

SEQ ID NO: 10741 - DNA, 543 bp, Photorhabdus luminescens
atgaaggtttatcttgccgtggtagcgaccagtttgttgttcattgctgagtcagcgaatgcaatttccgtgaatgttcaggcgggtcgccatttcacccatacttctgcggcaattggtgataacagtgccggattatccttgaatggcaactgggcacgcagtgatcataacgggcagttgggaagtttgggaacagcatttagcctgcctgttggtccattgacggccagcatagggggtaaggctctctatttatcccctaaagatgggaaaaatggtgaggcattagccgcaggtgtaggtttgagttggactattatgcccgctttagcgctgtacggtgaagcttacggtgcgccatccagattaacttcgggtattgattcttatgttgaggctgcgggtggcttacgttttaccgtatttaaaccgttgacggtggatgctggttatcgggttatgaacatgagagggaaagagggaaatagggataacaaactggctgatggattttatatcggtgctggtttgaatttctaa

SEQ ID NO: 10742 - DNA, 1206 bp, Photorhabdus luminescens
gtgaagaatcgtactcttggcagtatttttatcgtagcgggcacgacaattggcgcaggaatgctggcgatgccgctggcagcagccggtgtcggttttggaacaaccttcgtgatgttaatcactctttgggttttgatgagctataccgctttattgttggtggaagtttatcaatacagcccggccgatacgggcctgggaacgctggcaaaacgttatcttgggcgaggaggccaatggctcaccggtttcagtatgcttttcctcatgtatgctctgacaaccgcttatatcagtggtgcaggtgagttgctgtcaggcagcctctcttcatggctggataaacctattcctgtttcatacggtgtgctgattttcactcttgtcgcgggttgtgttgtcactatcagtactcaatctgtcgatatgattaaccgcctgctatttacggcaaaaatcatctttctggttattatgctgaccgtcatgatgccccacatcaaaagcactaacttgatgtcaatgcctttggaacaaggtttggtattatcagctattcccgtggtattcacctcttttggttttcacggcagtgtgccaagtatcgtcaattatatgggaggtgatacccgtaagttacgcaaaatatttgttatcggcagtgctatcccactgactgcctatatcttatggcaattagccactctgggtgccatctcttcccatacttttgtcggcatcttagcggagcaatcagggctgaatggactgttaaaagcggtgagagaagttgtcgcgacgcctcgtgtagagcttgctgtccgtctgtttgctgatttggcactggcaacctcatttcttggggtctccttaggtttgtttgactatatggcagatctgttcaaacgccgtaataatgcgacaggccgcctgcaaaccggcatcatgacttttgttccaccactactttgctccttgtactatccaaactttgttatggcgttaactttcgccgcagttgcactgtccattctcgccctgttactgccttccatgctggcttggcgcagtcgtcaaattgaacaaaaagcctatcgggtaaaaggcggaaaacccgttctgattctggtatttctttgcggaattacggtcattaccatccagataggtattgtcagtggtttactgccagaagtaggttaa

SEQ ID NO: 10743 - DNA, 1680 bp, Photorhabdus luminescens
atggaaagaatatctgtttgttttaggacattagttgtatctgttctattcgctatatcggggcaagcttatgcttcagcgtttattggcccggcggatcaagaggttatcactcaacaacagaaagcgttattgcagcaggctcaacagcagcgggaggcgttacgtaacaacatcactttgtctccagctttagagcacgaaactgatggtgctaaatctgtttgtcataccatccgctatattcaatttgaaggtgttgagagcctttcccaatcagtaagggaaaagttaatacagtcttatttatcccgttgcttaaccttgccagatattaatgaactggtgcgtaaagtatcgaatgcctatatcgagcgaggttatgtcacttctcgggctggactcagagcacaggatttatccaccggtacgctcattattaccgtgagtgagggcaaagttgaatcaatcactcttgatggtgagacatccctttcattgaaaatggcctttccgggaatggttggtaagacattgaatctacgggatattgaacaggggatggaacaactgaaccggcttccttcccaacagataaccattgatattcagccgggaaaacagcccggttattctgcggttatcttaaaacgaatatcgactcgtttgccggttggtgccagtttggggatagataatagtggtcaaaaaagtactggcaccgggcaaatcaacgccagtgtgaatgtagataacctattacatcttgcagaccaatggtcattatctgtcagtcgcaacaacgattttcgtaataaccaccgtagtcgaagtctctcttccaatgtgacgattccttatggtgactggttgttcaattatcaatatgcgtggaacgattcttttcaggatattccgattggcttacaaagttaccgttatgaaggtgacaaccagactcaccggctagcaataaaccggacgttgtatcgtgacggtgaacagaaactggctctgaatgcaggaataacacatcgtcagacggctaatttgtttgcaggaaagaaattatctatcagcagtccgatattaagtgttgctaatcttggtcttaattacagttcggtactggcgggtggctatatcactttcaaccctgcattgagttatgggttacccgtgttaggtgcaacaaaagatgacccgtatttcccagatgctccacgtagccaattccgtaaattcagcctgagtgttagctattttatcccgatttccgactctatttattacctttcatctgtttacggtcaaaccacaccgtacaacctttatgccagtgaacgtctctcattaggcgggcaatactctgttcggggatttaaagaacaatacctgaccggaaatcgcggtgggtattggcgtaatgaactgaattggcaaatttcagagttgcctgtgctgggtgaactggccttaacgggggcgctggatacgggttggttacagggaaaaaccagacaaatcgatggcggtaatgttaccggtactgcgcttggcatatcactgacgcacagtaagttcaatcaaacaatgacattgggaacacctctgatttatccagaccacctgaaaccggataactgggtagtttactggtctgtatcactgattttttag

SEQ ID NO: 10744 - DNA, 5088 bp, Photorhabdus luminescens
atggaaagacgtaacggccctatggcaaggggagcttgttatcttttaatttatcttactgccgtatatccccttcatcctgctattgcagccgggatcacgccagataataaccgaacacaggtacaaaaccagggtaatgtgccgattgtaaatattgctacgcctaatggtgcaggaatatctcacaacacttataaagagtttaatgttgcgactcagggtgccgtattaaataacgccactcaggtggttaaatcacaattagccgggcaacttaacgctaaccctaacttgaatggtaaatcggctgaattgattattaatgaagtcaccggtagtggtcgatctgatctccaagggaaactagagatagttggtcataaagccaatatgatgattgccaaccctaatggcattacttgtgatggttgtggttttatcaataccggcagtgcgacattgaccaccggtaaacctcaatttgataaacagggtgcgttggaagcattggaggttaaaaaaggccagattactattggtggcaaagggctggatggtaagacaacggattatatcgatattatcagccgggcgactgaattaaatggaaaaattcaagctaataatttatccctgacgcagggagctaatcggattgattttaacgatggcacagtgaaaaaaatcactggagaaggtgttaaacctcaattagccgttgataccaaagcattaggcggcatgtatgccaataaaatccgtttggttgctacggaagatggtgtcggtgttaatcttaaggatttaatcagcaatcagcgtgatattaccttaaacgttaatggcaaaattgagctgggaaatgccaaagccaaaacggattttaatcttagcgctaaagagactcatattgcgcaaaatatcaaggtacaagcggaacgggatattactctggcaagtactaaattggataataaagggagtgtaactgcgggccgggatatgcggatatttggtgataccttgcgtaataccggtgataaagcacttttgcaagccaataataatatgtggttacagaaggatgctcaggggaataagagcgatctgattgaaaacaagtctgcaacgataaagactgtgaaaggggatttggttgttcgcactgataaactggataatataagagatcaaaccataactgaatggaaaaccattccggctgactccgtaggaattaataaatgggctggtagtttttatggtatcaggcaaggtgttgattccgtcattacattggctgtaaaattgaaagattttaatcgggataaatggtttggtattatcgatttattaaagaataactttgtcaatattaaacaggatagattttcaataaaggcgataagcccagcagggagcattgtttctggtggtaatgcttatattaatgcaactaatttgcgaaatgatgtttcatctatatatgcgaaaaaagatcttattctcaccggggaaaatattgatattatcagccgtcaattaggtaagaaaaatacattttggcattatactacatcaaaccctatggctggcagtgaattcaaagatgatgatgcaccaccgggtgattgggatttattttatgtttatgaagatgcagaatatactaagcaaggagagttatatacttggggggaagaaagttatatatcgtcttcaattagtgcggaaaaaaatctagtagcggattttaaaaacaatttaaatatcagtacgttgattcctgataatgcaaaaaatctgtcagaagtaactgtaactgcccgacctgacacattatcagcaaaaaacattttgcttcacgcaggtaaaatcaatatcactgataaactaaaggctattgatgggttaaatattatttccgagaatgatattaatcttaataatgcagcattgatttcgtcaaatagcttatctatgacagcaactaataatattaatgctttgcaaggtgaactaaaagccaaagatgtaactattatcagccgcaacgggaatgttcagtttcagagtagtagcaaaccagggtattttaatcctgataatacgcgtaaaataagtagcttagaagctacgggtgatttactcttacatgcaggtaagaacattcttcttcgcaatatcctcttaacgaaaagtcataatatttctttaactgcaaatcatgatattaccattgataataacagtgagttattgacacataaacgaatgggggatgtgagcgctgagagtaaggaacaaacgctgtttaatcagatgttatctacaataggtaagcttgatgcaaaaagctcggttgtcattaatgctggaggaaatttatttattaagggagttaatgtttcagcggtaaaagatatcaacttgaccgctgcaaaaaacattgatctcactcctcgtgaattatctccttcactgaataaactattttccacatcccgttctggtgaattaagtagccgattaaccgcaggaaataatatcaatattatcagtggtgccgatatcaatggcaaggcggctcaaattaacgcgaaaggtaatacattattatcagcaggtcggaatattaacttgttagctctgggctattccgctattgataataagaacgataataataaagatgatcgccatatcgttgctgtagttaatggtggaaaacagcttaccttagctgctaatggaacgctgattacccaaggcgctacattaagctcaggaggaaatacaacgatttcttccggcggcaatatgcgttttgaatcagtgcagaatcactcttaccgggaaaaaggcagggaattcactgaatcagtcacacagcaaggtactgcattgactagtggcggtatattaactgttatttcaaacggcagtattcttttccaagccactaaactgactgccaaaggtgcgatggacgtcgcggcgaaaggcggttatctgtacgctcaggcaatggaagaatctagccactatgagaaaacagaaaccaaacgtaagtggtatggcaaaaagaaaaccattaaacgtacccgtcatgatgtcactaataaagtcactgaatttactgcgggtggtgatattaacctgttaagccgggatgatagcacttacgaagccagtaaaattgcgactaataaaaacgccaaactgaccagcactcacggtaaagttaattttaaagcagtaaaaaataccgcttttgaacagactattacctattccaaaggcttttatattaagcaaagggataaaggttataccgaaacccaatgggtattaccgcagattttcactggtggaaaactgacagtggaagcagccaacggtgttagtgctgatattaaagctaaaaatggtcagtcattgcaaaatgtattagccgtattgggaaatacgccagaaacagcttggttgaaagggcttcgagaaaataaagatatccagtggaatgtggtcaaagacgcttatgacagttgggatcacaagagccagcatttgaatccagtggtttctgcggtaattgcgattgcagcggcggcggcaaccgcaggcagttctttagcggcatctgtcgcatcttatgcgggtaatagcgttgcgggtggggcgttaactgcgggaatgtcatcactggcggcacaggcggcggttgctattgtggataatcagggggacatatccaaagcgctaaaagtattaggtagcagtgatgcggttaaatcaacaattacctcaatggcgattggtggcgcattggccggatttgattcctacatgggatgggataaagcggctgatggtaccaaattagatcccacaaaagcgaaattaccccaaatcagcaatggtgattggaataaagtcgtccaacgggtagcgggtcaatccattattagttctagcttgaataccgccattaacggcggcagctttaaagataatttgactacggctctgttggctaatattggcagccagattaatgcggaaggtgccagattaattggtgacaacggcgaagtgcttggagtgccgggtaaaacgttaagccatgcagttgtcgcagggataagcgctgaaattggcagaggaaatgttaaaggcgcaatggcaggggctttggctgcggaattggctggttctattatggataatagcttgtttgagcctaaatttcgtgatgaatcagaacgtcagttaaataagctaataaaggctatgtctgataatgaatctaatgcccagctagcaaaagtttttggttcagtagcgggagcaatagtaacaggaacgccggatggtgcttacagtggtgcaaatgcatctgagatagtttttcgttataactatattgatcatcagcttactcagttagcgttagaaaaccaaaaagatatgttggctgcaatggaaggtgataaagaggctttaattcgtgtggaagctcgtcaacaagctgcgttagcagttatggattacatccctgtcattggcgcaacgaaaggattttatgatgcagagaaattggaagattatcttcttgctacgctcagtgttattcctagtgggaagttatcagtaaaaatcattgaaaaacttaaagttgcggttaaagctaaaaatgcccctgaaacaaggatattgttgaatgaaattaagcgtgatattagtaagtcaggaacagtatgggattctataaaagcaacacagcctgcaattcctggaacatcaataccaaaatcgtttgagatgacggtaaatggaaaagttgtatgggttaacccaaatgcaaccaagcatatggaggaatatctaacgcgtaatggattgtcacacagcacaacagaagggagccaagctatgttgtcaagtcttcaacatgcgatcaagaatgcatcatctcaaggtttgaagtttaatgaaaaaatgcaagtaggtcgttgggagttaatatttagtcagcgatctacagatccttatccagtattaaaacatgcgttgtataaataa

SEQ ID NO: 10745 - DNA, 537 bp, Photorhabdus luminescens
atgatgctgaaaataatcaagccagtaaatgatcaggaagtaatcattaatattgatggttacacacctattgatatccaattagttgataatataaacgaaactcctttatattggagagttggtgatgataagaagagtttattagagtttgctattttgcctagtaatggcagaattgcagcgattactttggttataattaatccagagtttattcaatatgcagatgattatcttattgaatcatatgaaagtaaatgtggttttcctatagttgatgtgaatatatggagatttactgaaaataatgattttaatcatcgttttatcgatgaattcaattgtgtgattaaagcattgatttatcaagaatctataatgttggtcataaaagagaaatgtatgttatccagttggattaaatgtagcaactctttgtggttgggattggacgatgatgaaaatattgtaagtgttctaataagaggattatcaaaagaagatatcaataatttctttaattctattagttag

SEQ ID NO: 10746 - DNA, 345 bp, Photorhabdus luminescens
atgccagcaggttctcggttgcctgaaaggtttaagacttttgatttttatgatgaaaaaacaggtttggctaccagtgtaaaaacattggatacacgtactgcttcaaaaattaaaaatccaaaacaactgtatatttccataaaaggaaatattgatgataccattcgtttcattgatgaaacaaaagcaggtgtaaatgtcactgctaacatgatatctaagcgtgaagtgagaattgcaatacctaaaactaccactcctgaccaatgggagcaaatcaaccgagccattacttatggtgcagagaaaaatgtaagtgtcaaaattacggtggtgaaataa

SEQ ID NO: 10747 - DNA, 501 bp, Photorhabdus luminescens
atgagtgagatttttaaacgatggcggaatgccagatgtgtatttaatggtgatttttattcaataataagttattcgggttatcgttcactgaatttagaccttttagggggtaaccatatgttatctcctgatatttctgatgaggagctaggcattgtaattctggatgctctttctaaaagtcggctgattgatcccgatgataatttttttgacaatgaaaaaaaggctgagagatataaagaatgggttaaactcttaatggaaacttacaattattgttcaaaacgtcagctttttaaaaaaatgcataattgtggaatccaattgcttgatggccaaataacgataagaccatctagccatgaaaaattggaaggttggtctggagatggtatttctgtagctgattatgtcgtgattccggcagacagttctcctgaggaagttggagcagcattacggctagctttttcacgttgcagaagttatgtttga

SEQ ID NO: 10748 - DNA, 507 bp, Photorhabdus luminescens
atgaatgcagattttaaacaagggttaaatgcaagcgctatgttcaacggggatttttattctgttaaaacttattcaggcaatggtttattgagagcggatcccttaggtagcaaacatttactacagccaattgtatctgatcaagaattaggaaaggctgcacttgatgctttatcaaaaagcagagtaatcccacttgatgaatgtgaggattattttgatcatgatgcaagtgatgagcagtataaaaattggataacggagatgatgaaatcttatggctatcgttcaaaacgccgattatttaagaaaatgttgagttgtagtatttgcatgcttgatggtgagataacgatacaaccatctagccatgaaaaattggaaggttggtctggagatggtatttctgaagctgattatgtcgtgattccggcagacagttcccctgaggaagttggtgcggcactacggctggctttttcacgttgcagaagttatgtttga

SEQ ID NO: 10749 - DNA, 507 bp, Photorhabdus luminescens
atgaatgcagattttaaacaagggttaaatgcaagagttaaatttaatggtgatttctattcagtacaaacctattcaggcaatggcttattgggagcagatccctcaggaagtaattatttattacagccaattgtatctgatcaagagttgggaaaggctgtgcttgatgctttatcaaaaagcagagtaatcccgctggataagtacggggattattttgatcatgatgtaaatgctgaacagtataaaaattggatcaccgagatgatgggatcttataattaccgttcaaaacggcagttatttaagaaaatgttaagctgtggtatctgtatgcttgatggtcaaataacgatccgaccatcctgccatgagaaattggagggttggtctgaagatggtatttctgaagctgattatgtcattattccggcagacagttctcctgcggaagttggtgcggcattacggctggctttttcgcgttgtagaagttatgtttga

SEQ ID NO: 10750 - DNA, 1014 bp, Photorhabdus luminescens
atgaaaaaaacaataaaatggggcattattggttgcggtgatgttactgaagtaaaaagtggccctgccttttataaattagataattctgaattagttgcagtaatgcggcgcaacgctaatttagcagaggattttgctaagagacataatgtccctaaatggtattctgacgctaattcacttattaatgacaaagacattgatgcagtatatattgcaacacctccctctacacataaagaatataccattttagcggctaaagctggtaaagcaatatatgtagaaaaacctatggcattaacattcgaagaatgtaatgagatgatcgcgatttgtaaatcccaaaatgttcccttatttgtggcttattataggagagcattaccaagatttttaaagatcaaagaattaattgagtcaggtgcgataggaacaccaagaattgtaagttgtatactttacagagagatagagaaatgttaccaagatcctcatcatttaccttgggttgttaatccaaaaatttccggtggtgggttatttgttgatttagcatgtcatactcttgatatattagactttcttttgggaaagattatttctgtcaaaggacatgcaaattcacaagggaatgcttatcccgctgaagattgtgtatcaatgtcatttatgtttgaaaataatattcaaggtgtgggtatatggaattttgtgtcgaactctagaggagataatgttgaaataattggtactaaaggaaaaatatctttctctacatttggaaattcagccatttcatattatgacgaaaataataaattacaccaatttaatattgataatccaaagcatatagaaatgccattgattaatacaataattaatgaattacaaggaaaaggattttgcccatcaacaggagaatcaggctcacgaaccagttgggtaatagaccaagtattaaaagactatagaattaataattatttacaatataaaaatgaataa

SEQ ID NO: 10751 - DNA, 240 bp, Photorhabdus luminescens
atgccatccattactgtcagaaatgtaccggacgaagtgcatcgtgccttgcgggtacgcgcagccacacatggccgtagtgctgaggccgaaatccggtttattctggaaaacgccgtacaaccggaggggcgcatcaagctgggttccttgctggcaaaaatcggccgcgaggcggagggcgtcgatcttgagatcgagcgtgataagacacctgctgagccgatgagttttgaatga

SEQ ID NO: 10752 - DNA, 420 bp, Photorhabdus luminescens
atgatactgctagatacgaacgtggtttccgagccactgcggctcagcggccaccccgctgtggttgcctggatagatgaacagaatgtcgagacgctttacttggcagcgatcagcttggctgagcttcgctttggggttgcagcgctgtccaatggtaagcgcaaagataccctgcatagaaacctagagcggagtgttgttcctttatttaccggtcgtatcttgccattcgatgcggccgcttcggaagcttatgccgagatcatggcgcgagcgaagagcgaggggaaagccattgggaaggctgacgggtatattgcggctattgcagcggcgaatgggctgattgttgcaacccgcgacatatcaccttttgaagctgccgggcttactgttatcaacccttggaagggctaa

SEQ ID NO: 10753 - DNA, 609 bp, Photorhabdus luminescens
gtgaaaacaatggctctcccagcgatgacagcggcgttattggcgtctctggctcctgttccggctaaaagtaccgttctaccgatgacggttgttgaaatacaaaaatcagcaggtttgatatctacattgacatttaacctgaaagatgaacaagtttttctgcctttgtcagaagcaactgcttacttgcaaagtctgaatgagtacacacgaaagtcgttatctgaagctatcgctcatcgtattgctaaggggagtggtggattgttttcaaattcagtacgtataagaaaattggccaatgacaacattgaatattgcatgaggataaaagaagcagtacgtatcgttctgtcacctgataatctgagtaagaattttccagatccgtctgagcgagaaatatttcgggtgaatattgtaaagtttggtcgagcaatagcgaactctgaatatactgcgtgtgatattctttcggctattgaacaaagcctgcctccgacaaagacgtatcatcctgataatttacctacttctagagaagttaaattgatgatattagcagaacataaaaaccttggtctgtcagagccggaatttttataa

SEQ ID NO: 10754 - DNA, 381 bp, Photorhabdus luminescens
atgggagtcagtgttactgttcataaagatgttgagtttcatgatgttgcaatagtttatgcaaagttgttagagcattggaaaaggacggcgttattaccttctgtatttggccgggatggtcaatgggaacataatagcagaaccttagattcaaatatctataaattgcatattagaatgccagatgaaataccgtgggaaaaatataagccacagattgatcgatgttcggataattatttagtgtatgtgcagcattggatggatagtaagagttttcaggtgataagtattatgagcccgaaggctcacgaattagcaaaaacgtcatttcttacagagcttgagcgtagggttgaggagttccattccatctaa

SEQ ID NO: 10755 - DNA, 267 bp, Photorhabdus luminescens
atgacaagctataaagtaaccctgcatggtatgcagggttatcatatctacagctctcccgaactgcataacagtctgctagaggcattggaacaaggtagagttcaagctgaataccaatgccgcgaaggttattgcggttcctgtcgtgtcaaattgataaaaggcaaagtcggctatcgacgcaaacctctggcttttgttaatgaaggcgaaattttaccctgctgctgtcatccgcttagtgatattgagattgagctttag

SEQ ID NO: 10756 - DNA, 1131 bp, Photorhabdus luminescens
atggcctataccactttttcacaagtcaaaaacgatcagttacaggaacccatgttttttggtcagccagtaaatgtagcccgttatgaccaacaaaagtatccgattttcgagaaattgatcgaaaaacagctctctttcttctggcgcccggaagaagttgacgtgtctcgcgaccgcattgactacaatgcgctgcctgaccatgaaaagcatatttttatcagtaacttaaaatatcaaacgctgctggactctattcagggccgcagcccgaacgtggcttttctgcccttgatctccatccctgagctggaaacctgggttgaaacttggtctttttctgaaacgattcattcacgttcttacactcacatcattcggaatatcgttaatgatccggcggttgtgtttgatgatattgtcaccaatgaagagattctgaaacgggcaaaagacatttccgcttattacgatgatctgattgagatgaccaatcattatcagctatttggtgaaggcacacatcagattgccggtaaaaccatcacggctagcctgcgtggactgaaaaagcaactgtacctgtgcctgatgagcgttaacgcgctggaagcgatccgcttttacgtcagttttgcctgttcatttgcctttgctgaacgcgaattgatggaaggtaatgcaaaaatcatcaaattgatcgcccgtgacgaagcactacatctgaccggcacacaacatatgctgaatctgctgcgctctggtcaagacgatccagaaatggcagaaatcgccaaagagtgtgaacaacagtgctacgacctgtttgttcaggcggcggaacaagaaaaagagtgggcagattacctgttcagcgaaggctcgatgattggcttgaacaaagatattctgtgccaatatgttgagtacattactaacatccgtatgcaagctgtcgggttgaaactgccatttgaaacgcgttctaacccgattccgtggattaacgcctggctggtgtctgataacgttcaagtcgcgccgcaagaagttgaagtcagttcctatctggttggtcagattgatgctgaagttaaccctgacgacctgagtgattttgaactctga

SEQ ID NO: 10757 - DNA, 2292 bp, Photorhabdus luminescens
atgaaccatagtctgctagtaacaaagcgtgatggccacaaagaacgaattgaccttgataaaatccaccgggttgttaactgggcagccgatggactgaaaaatgtctcggtatcacaagtagaactgcgttcccaaatccaattttacgatggcatcaaaacctcagatattcatgagacgatgatcaaagcttccgctgatcttatctccggtgatgcacctgactatcagtatctggccgcccgcttggcaattttcaacctgcgtaaaaaagcttacggtcaattcgagccaccctcgctctatgaccatgtatcccgtatggtgaaaatgggcaaatatgacaagcacttgcttgcagactactcgaaagaagaattcgagcaaatgaacgagtttattgaccattggcgtgatatgaacttttcttacgcggcggtcaaacagcttgaaggtaaatacctggttcagaatcgcgttaccggtgaaatttatgaaagtgcccaattcctctatattctggtcgcagcttgcctgttctccggttatccgaaagagacacgtctggactatattcgccgtttttacgatgcggcttccacatttaagatctctctgccgaccccgatcatggcaggtgtacgcaccccgacgcgtcaatttagctcatgcgtattgattgaatgtgatgatagcctggattccattaatgcgacttccagcgcgattgtaaaatatgtttctcaacgtgcgggtattggtatcaatgcaggccgcattcgtgcgctgggaagcccaatccgtaatggtgaagccttccataccggctgtattcctttttataagcatttccagaccgcggtcaaatcctgctctcaggggggcgttcgtggtggtgccgctaccctgttctatccattatggcatctggaagttgaaagcctgctggtactaaaaaacaaccgtggcgttgaaggaaaccgtgttcgtcacatggactatggcgtacaacttaacaaactgatgtacgaacgcctgatcaaaggtgaagagattaccctgttcagcccatccgacgttccagggctatatgaggcattctttgccgatcaggatgaatttgagcgcttgtacaccaaatatgagcaggacagcaatatccgtcagcaacgtctgaaagcggttgatctcttctccctgatgatgcaagagcgtgcttctaccggccgtatctatattcagaacgtagatcactgcaacacccacagcccatttgatcctttagtcgccccggtgcgccaatcaaatctgtgtctggaaattgcactgccaaccaagccattgaatgatatcaatgataaaaatggtgaaatcgcgctgtgtaccttatccgcattcaatctgggggcaattgaaaatcttgatgagctggaagaactggctactctggcagtccgtgcccttgatgccctgctcgattatcaggactaccctatccttgccgccaaacaaggggcaatgggtcgccgtacattaggcattggtgtcatcaactatgcttactatctggcgaaacacggtgtacgttactccgatggcagcgctaacaacctgacccacaaaacatttgaagctatccagtattacctgttgaaagcctctaatgaactggcgaaagaacaaggcgcttgcccgtggtttaaagaaaccacctattctaaaggtatcctccctatcgatacctataaaaaagcgctggacacattgaccaatgaaccgctgcactatgactgggaagcattgcgcaacgagatcaaacaatatggtctgcgcaattcaacattatcttctttgatgccgtcagagacctcttcccagatctctaacgccaccaacggcattgaaccgcctcgtggttatgtcagcatcaaagcatcaaaagatggcattttacgccaggttgtaccggaatatgagcgtctgaaaggtgcttatgaactcttatggcaaatgcctggtaatgatggctatttgcagttggttggtatcatgcagaaatttatcgatcaatcgatctctgccaataccaactacgatccgacacatttcccaagtggaaaagtgccgatgaatcagctactgaaagatttattgctcgcttacaaatatggtgtgaagacgttgtattaccacaatacccgtgatggtgcggaagacattcaggatgacctggaagaagtcgtggaatctgctgattccgattgtgaaggcggcgcgtgtaagatttaa

SEQ ID NO: 10758 - DNA, 723 bp, Photorhabdus luminescens
atgaacatcaaaaccccttccaccccaaacaatgttgatcaacaggaaatagaaaaatttgaagcgatcgcttctcgctggtgggatttggaaggtgaatttcagccactgcaccggattaacccactacgcctgaattatattttgcagcgttctggcggtattttcggtaaaaaagtgttggatgtaggctgtggtggcggtattttgtcagaaagtatggcccgtgaaggggctgatgtgaccgggctggatatgggtacggaaccacttcaggttgccagactgcacgcccttgaaacaggtatccccgtgacctatgtacaggaaacagtagaaagccacgccgaaaaatatccacaagcttatgatatcgtcacctgtatggaaatgctggaacatgtcccagatccacaatcggtcgttcacgcttgtgctcagttggtgaaacccggcggacacgtctttttctctaccattaaccgcaacaaaaaagcctggcttatggcggtaatcggcgcggaatacatcctaaaaatggtaccgaagggaacccatgatgcgaagaaatttatccggccatcagagttgataggctggattgacagaacatccttgcgggaaaagcatattatcggcctacattataacccgctaacggataaatttagccttggtcacaatgtagacgtcaattatatgttacacagtcagtatgtctga

SEQ ID NO: 10759 - DNA, 2637 bp, Photorhabdus luminescens
atgagcgacattgccagagaaatcaccccggtcaatatcgaagaagagctgaaaagctcgtatttggattatgcgatgtctgttattgttgggcgcgcactaccagatgttcgagacggactaaagccggtacaccgtcgcgtgctttatgccatgagtgtactgggaaatgattggaataaaccctacaaaaagtctgcccgtgttgtcggggacgtcatcggtaaataccacccacatggggatagtgcagtctacgacacgattgttcgtatggctcagccattttccctgcgctatatgttggttgatggtcagggtaactttgggtcagttgatggtgactcagccgccgctatgcgttacaccgaagtgcgtatggcgaaagttgcccatgagctgctagcggatctggaaaaagagactgtcgattttgtgccaaactatgatggtacagaacagatcccggaagtgatgccaacgaaagtaccaaacctgctgatcaacggttcttccggtatcgcagtgggtatggcaactaacattcctcctcataacttatccgaagttattgatggttgtctggcttatattgaagatgaaaacatcagcattgaagggttgatgcagtatattcctggcccggatttccctactgctgcgattattaatggtcgtcgcggtattcaggaggcttatcggactggtcgcggtaaaatttatatccgtgcccgtgcggaaattgaagtggatgagaagaatggtcgtgaaactattttagtgcacgagattccttatcaggtcaataaagcccgtctgattgaaaaaattgccgaattggtgaaagaaaaacgcatcgaaggggttagtgcacttcgtgacgaatctgataaagacggcatgcggattgtgattgaagtgaaacgggatgcggtgggagaagtggttctgaataacctctattctttgactcaactccaggtttcttttggtatcaacatggtggccctgcatcaagggcagccgaagctgctgaatctgaaagatattatttcggccttcgtatgccaccgccgtgaggtagtcacccgtcgtactatctttgaattacgtaaagcccgtgaacgagctcatattcttgaagcattggctgtggcattggcgaatatcgatccgattatcgaacttatccgttttgcatcgacgccagccgaggcaaaagctgcattagttgctcagccgtgggaattaggtagtgttgccaccatgttagaacgtgccggcgatgatgctgcccgccctgaatggctggaatcacaatatggcgtgcatgagggtaaatattatctgactgaacaacaggctcaggcgattctggatctgcgtttgcagaaactgactggtttggagcatgaaaaactgctggatgaatatcgtgaattgctgacattaatcggcgaattgctgttcattttggaaaatcctgagcgcttgatggaagtgatccgtgaagagttgttggcaattaaggcgcaatacagcgatgcccgccgtactgaaatcacggaaaatacggctgatatcaatattgaagatttgattaatcaggaagatgttgttgttacgctgtcacatcaagggtatgtcaaatatcagccgttatctgactatgaagcgcagcgccgtggtggtaaaggtaaatccgcagcgcgtattaaagaagaagattttattgacaagttgttggttgccaatacccacgatacgatcctctgcttctccagccgtggccgcttgtactggatgaaggtttatcaattaccggaggctagccgtggtgcccgtggtcgtccgattgttaacctgttgccgttagagcaaaatgagcgaattacggcgattctgccggtgcgtgaatatgaagaagggttatatgtctttatggctaccgccagtgggaccgtgaagaaaaccgcgttgcaagatttcagccgtccgcgcagtgcgggcattctcgccgttaatcttaatgatggtgatgagctgatcggcgttgacctgactgacggtagtaacgaagttatgttgttctccgcggaagggaaggttgttcgttttgcagaagaagcggttcgttcaatggggcgtaccgctaccggtgtacgtggtattaaactaaatggtgaagataaagttgtttctctgattatcccgcgtggagaaggagaaattctgacggtcactgaaaacggttatggcaaacgcaccgctgaaaacgaatatccgatcaaatcccgtgcaacgcagggggttatctcaattaaagtcagtgagcgtaatggtaacgtgatcggggcaattcaggttgaaccaaccgatcaaataatgatgattacggatgctggcacattagtacgtacaagggtgtcggaagtcagcgttgttggccggaatactcaaggcgtaacacttattcgtaccgctgaagatgagaaagttgtcggcttacagcgggttgctgagcccgaagatgatgaagacgatgaagatgggttggcagcagaaggggaagaggtgaaaagtgatagcaccgatttacctgatgctaacagcagcgagtcagttgatccggtttaa

SEQ ID NO: 10760 - DNA, 2760 bp, Photorhabdus luminescens
gtgcttggcttaatgttgtgggcattgggcgctttattaacagctttttacctggttaatatctttaatgaagttaaatcagatattcggcaagaatacaatgctaattatgattccacgctctcttatgtgcgtcatacagcaagtgttctgcgggatatccaatatatgacagaaaagcatttactgaattctaatggaaaaaatgctatttttgattttccacataataacccggcgttttcttatcatccgttgaaccaaaacgctgattgtcatacttttcgcaacaacactcatagttatttaaattcattaaataatcttatcttctattggaaggataatcttgctgcgcctcaggggttgaatcaggtttttctggtgggtacgcaaagtatgtgtatggtaagtttttctatccgtaataccacgactgaacccgatacgttgaaaaaaatagtttatgaaaattcacgtaggcttatcagcctgaaagaacaaggtaaagaacgaaatgtttattgggttataccgggtgcaagatctgatagcggccatctctacgtgttggctccggtatatgtcaatggtcagatggttgccatgataggcattgaacaattcatcagattggactcttttattcagagacaagaccgcccaatttcaataacgttattgaatagcagtaatcacccggtgttgcattatccagcaaatgatgactataaacttcattatgctgattatcagttggaagcgccttattttggctatgatgataattttactgatttactgctaaaacgtcggttaatgccatcttcattcagtatcatttatgccctgtcactgaaaactatttttgaaggttttaagctacagattattagcagtattgtgcttaatgcattatctgcctttgtcatcattatcttggtgtatctgtttgagcggaaaatgtttgttccggcagaagagaatgccatccgcctggaagagcatgagcaatttaatcataaaattgtggcttcagcgccggttgggatcagtatattgcgggtcagtgatgggagtaatattctgagtaatgagttggcacataattatttgagaatgctaacgcacgaagatcgggaacggattattcatattatttgtgacagaaccagtagttatgttgatgttgtcaccagtaatcatcatcatttgcaaatcagttttgttcattcccgctacaggaatgaagaggtggcaatttgtgtcttggttgatattagtgtccgtgtgcggatggaaaaatcattacaggaaatggcgttagcatcagagcaggctaactattctaaatctatgtttttagctaccgtcagccacgagttgagaacgccgctttacggtattattggcaacctggagttattacaagcacattcattgcctgctgaatctgtccgtttgttatcaacgatgaataactcctcagcgctgttgctaaaaattatcagtgatattctcgacttttcaaagatcgaatctaaacagcttaaaattgaatctagagaattttcctgtcaggaagttatctctcatgttatttctaactatctaccgttagtagtgaaaaagccattgaccttgtattgctatattgaaccgggtgttccagattatatctgcaatgatccggttcgattacaacaagttatatctaatctgttaaataatgcgattaaattcactgataccggatgtgtgattatccatgtgacagttgataaagattacttatacgtcagaataaaggacacgggtgtcggtatctctgataaagcgcttattcagttgtttgatccctttttccagatcatgccaaatacggaaagctcatctcagggaaccgggcttggtctggcgatttgtgaaaaacttatcaatctgatggatggtgatattgaagtcatttcccaaccacagatagggagtatgttttctattcggttacctttatatggtgcgaaatataggccaaaaactcagctaataaatgagtctcagcggaaaatcatcttggctatacgcaatctttatctggaagaatttttacagcgttttctggttcatcatggcttacacacggttttatacagtgagcagaacacagagggtagtgaaattattatcagcgattttcctgatgcggttatttcccctgtatatgcttatattgaattatcgacggactatattggctcaccggaacaaatcagagaaaactattggttacataacacttaccatttacatgatttgtcggtaatgattgagcggctgatttcaccgaatcatcatgtggtattgaatacagccccacctgtttttcaggcaaacactcggtttaatactattgtggttctggtggtagatgatcatcctatcaaccgccgtttattggccgatcagttgaaatccattggttttcaaacagcgatggcaaatgatggattagatgcgttggaatatttgaagagcggggggattgatatcattctgacggatgtcaatatgcccaatatggatggttatgcgttaacaatgtatttacggaatgatgggtgtaagctgccgattattggtattacggcaaatgcactggcagaagaaaaacaacgctgtattgatgcaggaatggatgattgtttgtcgaaaccggtttctctggtgacgctcaggcagacactgacgcaaatgatttga

SEQ ID NO: 10761 - DNA, 654 bp, Photorhabdus luminescens
atgaataaccttaacgtcattattgctgatgaccatccgattgtcctgtttggcatccgcaaatcacttgagcggcttgaatggatcaacgtcgtcgctgagtctgaagactcgaccacattgatcaacaatctgtcctgtattaaagcaaacgtactgatcacagatctgtccatgcctggggacatatacggcgatgggatcaatttgattaaatacatcaaacgccattatcccaagctatccatcattgttctaaccatgaacaataatccagcaattttaagtgctgtactcgaacttgatattgaaggcattgtcttaaaacaaggagcaccaacagatttacctgatgtattgacggccctgaatcaaggggaaaaatttatgccagacagcgtttctgaactgttgaaaaaagtgacgaaaaccccctatggcgataaaccgttatcacaaaaagagagtgaagttatacgtctatttgcccaaggctttttggtaacagacattgccaaaaaacttaaacgcagtgtcaagactatcagcagccagaaaaaatcggctatggtaaaactgggggtaaataacgatattgcattactcaattatcttgcttctgtcacaatcaatacgagcaatcacgttcagtaa

SEQ ID NO: 10762 - DNA, 1677 bp, Photorhabdus luminescens
gtcacgatattatctcccaatatccccattggcttattgatttatgatttctcagtcaatcagataattatgtgcaataacatcgccgaccatctgttgccgaatgtcgatttaaataaaattaagatgatggccaagcaacatcatggtgtcatccaaacctcaattgaggattcagtctatgaaattaacatgtacaaccttcgcctgttgccagaaacttatctgtttttactgcaagataaagatcaggaagcattaattagccggcgtctacaacttgcccatttggaacacgataagagtgtacaagctcggcgttttatgttgaccaacattcgttctgaattaaaacaaccaataaaagaattagatcatctcgcttaccaactgaaacaaattcttatagaagaaaatagtgttcgtatcgtcgataatttattgactaaatctgaatatatctccgactggattgagaatatttcattactcaatgaattagaatcaggtgaatggcaagcaaaaaatgaatcgttttcattatcagtcattttagaggatattattaaaaaagtgtttcctaaaatgaataacaaaggattgaattattattatcattgtaatattaatcctgaatcactatttattggcgatagtactgccatcagtaagatcgtcctgatgttagtcaattatgcaatcacgcttacatcttatggcaaaatatctctcatcgttaactattctcaggaatacaaagaacacattcaaatcgacattatagatacaggcgccggacttaattcaacagatttaacaaacttgaattatccatttttaagcaaagccacaggcgataaatatcaatccaattcagggctgaccttttatctgtgtaaccaattatgtagaaaattaaatggtcattttactataaacagcaaacccaacctgggtacgcactatgctatcagtctgcccttaataatcggccaagaccaatgcccgccgctactggaagacattactgccttgttggatatcagcaatacgaagatccgtaagattgtacaaaatcatctgcatcattatggcgcggtttacttcgataaaaagccagaaaatatgaatcgagaatacgatatcatgttgacggataaaccctacgattcggcaaaatcggctatattactggttgataatctggccggctttgagcagataaaacctgactatattcgatgtaactacaatctgggtgaagcggttatcaatgccatttcgttattaattgagagaagtttcagttttaacgaattcacggcaaatttagaaatgtcagcatttaacgatgaaagcagcgattacgattttgacaatgttataaatagttatcaaaaacagctaactgatagcgattaccgacaattatttgtcgagacagtaccgatagatattaataagctgtatactgatatagaacaatatgatctgatatcgctttcgcaaacagcacatcgcctgaaaggcgtctttgctatgttagacctagaactcctcaaactttcttgcgaaacactggaacaacacataacagacagtaacgaaatagagattaagaatagcattagccgtcttgaatccttcaccaaaaggctattgcagcagggtaactaa

SEQ ID NO: 10763 - DNA, 1062 bp, Photorhabdus luminescens
atgtataacaaacaattttctattaattcatcaaccataaaccgttactacggtctgttcattattctgctttttgtttccctgtttttatacagctataactacttcaatgcctggctaatggggaaaaaatatgcgctaaatagcgttgcaaccaaagtagtattacagatagaagattatcgttaccacgctaattctatctttaaacaagccaatagcgcatcttttaaaccaccagaactcatcacaccaatgaagctacggcctgatgtttactggcttgagaatcgttatcaaactatcgacacgattatttttggtcaccacagcactgcaagtgtagagttggcacaacgcctttccaattatatggagattttgtggggcacccgcaatgaatacaactccatgtactatctgaatggtaaagataacaatctgtttctgataaccactcactctattcttaaaccagaattgagatttaaagaaagttatctaacactgactgccgaatcaaaacgttcagaaatgctgatgcaatccaccgcgttagatgaacgggaaaatatttcttcaatccataagttaaatggcgaaaatatctatttttatacttatcgggcgacgttcaattcaccgggtcaattggcaacagttatcgcttttgatttgcctatttgtcaccttcttcctatggatatggcagcggccaacttcagtctattgtcggatgacgagcaaccccctaatgaaatcaataaagtcaatatttcacaaaatggtttctggctcgaattttctcaatcacttaaaggtacgcaatacaaactgttgtatcggatatcactcaaagatttgctaatcgatttgttatacagaaacatctggttgttactggctgattcagtctttattatcctgtccttaggtgggcttatttacattcgtagaaaatatatcgcgccaaatgccctgatgagccacgaactacaagtcaaggatgcgttaagtcacgatattatctcccaatatccccattggcttattgatttatga

SEQ ID NO: 10764 - DNA, 627 bp, Photorhabdus luminescens
atgctagaagtgtcccaaatagtaacctatacagcggcattgactgttgctgcggcgataccaggcccgggaatggcagcattggttgccagaagtgtgagtaatggcgcgttagcgggatttagtgtgttgtttggcctgattattggtgatctcacttatttatcctttgcggtttttggcttgtccattatcgcgagcagttttgacaccttatttgttgtggtgagatggggtgccgcattatatttgggttatctggcgtggcagttctggtttgccgatcatcaatccattggtgaagaccaacccattaagaaaaaagagttggctgcggcttggttatctggtctcactctaacattaagtaaccctaaaacgatcgccttctatctcgcactattacctttggtgattaacatggaatctatctcgttgcaaaactgggggctcatgttagtaccactgacggtttttgtcttattcagcgtaggagcggtatttattctcggcgctctcagtattcgacatctgttatcaagccaacgggcacaacggattttatttaaaggcgcggctattattatgttcgtaaccgctgtaactatgctgttcaaatccaattaa

SEQ ID NO: 10765 - DNA, 969 bp, Photorhabdus luminescens
ctgatcttgaaaggcatcaatatgctttatgtcgataaagaaaccgttgcgcgttatttgacgatggaacttagtcttaagctaagtgaaatagcatttaaattgcaatcggaaagaaaagtagagcaacctttgcgcaatatcgttaaaggtgaagacggcttaatgggcaccatgccgatttatattaaggaagggccatacaaagggtttgggttaaagtcggtggtagtgagatttcaaagcaatagcgataaaccttcacacatcggtagtgtgttagtttacgacgagccaggtgtttccgggattgccgcggtggatgccggcgctattacagaaatccgcaccgccgccgcctctgcttatgcaacccatcttctcgccgcaaaggatgctagccggttagcgatacttggtacgggcttacaagcaaaagcacatttgcaagccatgttatctgtacgcccgattaaagaaatcactttatggggccgtaatgcagaaagatgccgagaatttgctgcaaggtgtgataaaacgctcaatcttcccatttcgatcaaagcctcacctgctgaggcggtactcaatagtgacatcatttgcacaaccacggcatcgcgtgacccgatactcaatagaaaagcgctaccggttaaatgtcatgtcaatgccattggcgcttcggcactgggatttcaggaactcagcgaagatatgtatagcaatacaaccctatttactgattccaatgaatcggtacttgccgcctctcaatctgttattaaggcaagggagaaaggtattattaacgggtcagacattggggtagaaattggtactgtttctcaatctcattccaatttgtgcgatcagggtgtgactatctttcaatccgttggtttggccgttcaagatatggtattttctcgggaagtcattcgacaactaataaaaatgtcttaa

SEQ ID NO: 10766 - DNA, 543 bp, Photorhabdus luminescens
atgtctttacttacgctacacaccattactaccacacctgaaaaaagtaaaaaattacttcaaagttctattaatgatttcggctggatacctaaccaaagtggttatatgtcagaatctccttcactattagccgcttatcaacgagcacacgacctatttattgatagttcactgaatgaagaggaaaaagcggtggtgtggattacaaccggagtagaaaatggttgtaactacacgattcaggcacacggctatattgcaattcataatggtgtggacaaaaaaacagttaaggcattgattgaaaaaaccgacgatctctccccacgattattggcactacgtgaatttaccatcgaggttatttattgccggggacaattgaaaagaagtgctattgatctattcctaagtcgtggtttcagcaaacagaatatgctggatgttgtgttaggggtttctcaaaagaatatgtcgacaattctcaatagtattgccggaaccgagattgatgataaattcaaactggacgacctttaa

SEQ ID NO: 10767 - DNA, 579 bp, Photorhabdus luminescens
atggaatgtgttttttttagtttctacaaagatacatttgatgttctaaatattgctaccttaggcccgtcaggcacaagtagcgagcaatccgctattcgttttggtgaatttgccattaaaaataatgtcgccaaaagttaccaagttgttttatgtaatacttacgaagaagcaagtaatcaaattattttaaataactgtcaggcattggtggtagccaatgcttattacaatatcagtgagttttatatggataacaggtttaacttgtcatccgcatttttaaactacacgcctaattacggtatcgctattcgtgatgaattaactacagataatatcgtcattgcaactcatccggcaccaaaggctttaatcccagagttgttgcccgataatctaagaattgcagatatcatttttaaagactcaaccagttcagcggcaaaagcagtcgccaattcagaggtagatgccgcactcacgaccgaagtggcagcaaaattacacaatttaaaatttatttctcatattcgaccaattcaaatgctttggtcagtatttacagccgcataa

SEQ ID NO: 10768 - DNA, 948 bp, Photorhabdus luminescens
atgacaaacaatatcgttagcccagttaataaagattggatcgtatttctagacggggaatatctcaattttagcaatgcgacctttcttgccaatacacaagctttaaattatggcaccggtacatttgaggggatccgggcttattgggatcaagacaataaccaacttaatctatttagagtgcatgagcactatgaacggttaattcaatcagctaaaacattaaaaattgaattaccctataccagtcaggagttaaccgatattactaaaaacatcattattaaaaatggtttcaagcaagatatttatatcaggccattagtgcttaaaaagtcgttaatgccgggtgagaaatttggcgttaagctaagtggtgtaaattcaaccctctgtattaacgctttacctatgggcgcttatgccaaaaaagcagagtttacatgtcttatttcaaaatggcgacgtgtatcaaatgcggcaattccatcatctgccaaaattaccggcacttatgttaattccgcacttgctcatgaagatgccaaagaaaacggatttgatgatgctatcatgttgaatgaacaaggcatgtgcgcagaagcaagtacatcaaatgtttttattgtaaaagataattgcgttattacaccatcgcttagcgctggcattcttaatggaataaccagacaatctgttttcgatatttgtcaattccgcaatattccttgtattgagtcagaaattcaacaaaaggatctctatgaagcagatggctgttttttaacaggcactggccttgaaatatcaatcgtttcacaaatagacgatgtgtcatatagacaaaaagaagattctatagccaatgttattgcccaagattaccaagaaataatcagaggcagagtagataagttctcacattggttaaatccggtttattag

SEQ ID NO: 10769 - DNA, 1404 bp, Photorhabdus luminescens
atgtattccatttttagaaatgaacttcatgaattaggtatgaaataccttaccgagctaaaaaaatatctgtctggcgagataaatatctccacattggaaaaaatacaatacgaaaaattaaaagaagttataaattatacgaaaaatgggtcagctttctatcaagatcgtctagatgcaataaacccaaatgatgatgaaagtttatcctcattgattgaaaaacttccctttactacaaaatcagatctaagtaaggcgggaaacacgatatcttcagatagcctaagtaacgcttggatatattatgaaaccacagggacgactgggccatcaacgccttgtcctcgcaatgaaatagactctttagtcaataatagttttctgactctgcaatatgagtctattttcaatcaagaaggcaaacaacacattattggcgtgatgggtccaacggaattgcactccactggcgatacatttgaagatgtatttcgcagtttagggcataccgttatcaaaatgtggcctcgttcgcccgttgttggcatgcacagagtactcaggctgatacaagacctcaaaataaccgctttagtttgcacacctgcggtcgccgctgagttgttaaaatattgccggaacaatgcatgtgatgcaaaagaattaggtatcgagatcattttagtgcttggcgaacttattacgccaaatagattaagaaacttatctcggaattggggcgctaaaatttacaactgtatgtatgcctcacaagaaacatcaattctggcggcttgtaacaataccaataagcttattactattccatataacaattattacgaactcatttgcccttttacccagcaaaaactcaatgttggcgataatcacgttgcgggcgaattagtgattacccatttatataaagggaacaaacctctgattcgatacaaaacaggggatatggttcgatgcaaagcaataggcttaaatcaatgggaaatagaacccatcggccgggtaaaagatgtattagtattaaacaatgccaatgtgtatgcttttgatattgaaaatgccatctttgaagaactcgaatattgttttgaatactttattgaaatcaacaacacagccggtacagataagctcaagatcactttagaaccgagtgacgaattaaatgatgcgtcactcatgagtaaaataaagcaaaaaatggaatctaaattcaatatgaatgtcgacatccatgtcggagatgtcggtggactgattggaaccgcggcaatggtaagttggaaagcagcacgcatccatgatctgagagatgataccaacaatattgagcgaaattcggctttagaaatcatgaacaagagggccaataaatga

SEQ ID NO: 10770 - DNA, 423 bp, Photorhabdus luminescens
atggagtttgacgaaaacctacataaaagtgtcgtcgttatcgctgatagtctgccgcttgggttagccatgaatgcactgagcgtcattagtgtttcaataggtagaaatatcgacgggattgtaggacacgatgtctttagtaaagatagcatttgttatcccggtgtcattaaaacgcctttgcctgttttgaaagcaagtcatgatgtactggatgctattcatagtgaattaaaatctaacgataattttaaattgagccctttctcctgtttggcgcaatcatgcagaacatatgaggaatacgaaggaaaattatctgctgagcattcggatgaattgaagttatctggaattggcatagttggaccaaagaaagatatcaataaactcactggcaacttaccactttataaataa

SEQ ID NO: 10771 - DNA, 378 bp, Photorhabdus luminescens
atgaggcaaattatgctgggcaaaaataacttaattgcacatcaagtcttatttaccttcaaggatggaataagctgggatagtgaaaaggctatattagccgagaaggtgactttaaatcatataaatgagataagtgaaataaaaggatggttttgtggccgcagtacggtagacagaaagcaatcagttgactttagtttaattggttactttgaaagttacgaagacctggacatatacatgcatcatcccgatcatataaaaggcgtggtgctatggaaagaaataagtacatggacagtctcggatattattattgatctaaataagttgataaatttcactcagttaataggaaagtcgtatggagtttga

SEQ ID NO: 10772 - DNA, 420 bp, Photorhabdus luminescens
atgcgcaatattcaacaagttttagagtgttggggcggttgggttgatgatgccactggtgttaattggccaccgatcgctgctggatttaaaggtctgattgcgtcaactcgttcattacgtccttcctgctgtgataacgatggcttgatcattgatgcttgtatcgcaaagttgcagacggtggataagtctgaagaaattgaagttttatttatgtactacgctttaaggctttccaaacggtccatcgcgcgtttaattaaagtacctgatattgaagtacgttcccggttgcaaaagggagaaagttttgttcagggatgtctggctatgctcgatattaaattagaaatggatgatgaaatacaaaaacacaaaaagcttgcgcgtacgcaaaaagctatggtagtgtactaa

SEQ ID NO: 10773 - DNA, 564 bp, Photorhabdus luminescens
ttgatggaggtatttttgatgagcaacggtagtgataaagcgggttggttaacacctgtcacgcttgggcctgaatacgatgatgagctggagcacatactgagtcgttggctaggcggtgtttctggtttgcctgacgataaagtgcattctcaatggacatcagcacaactgccccagttaccggcagatgatgacgggtgtgattttgttatcacggattttatttcagatgcctcgccggcttttgagaaccagactgacgaaggaaccaagttatggcgtcatgaggaaattgtgtgcttgatctccttttatggcccgaacagccagcggtacggtgcctgttttcgtgatggcgtggcggtcagtcagaacaatgatgaattggaacgtttcggtctttcagtcgacaaactcagccggctgacttctttaccggaacttatcaataaccagagggggcgtcgttatgacatgacgatcaccttgcggcgaaaagtggtgcgtgaatacggtgttaaatcactggtggaagcgcctgtcaaattcttaggagattaa

SEQ ID NO: 10774 - DNA, 1470 bp, Photorhabdus luminescens
atgcagggtttacctgtttcaaacattatcaatgtcacgttgaatatggctcctcatgcggctcaatcccggaactttggggcgttactgatcatcggtgcaagtaacgtgatcaaccctcatgaacgtttacgccggtattcggatatcgatggtgtcggtgctgattttggattgagttcaccagagtatcaggccgcggcgctttattattcccagtcaccccgtccggttgatttatatattggtcggtgggctaaggacaatgtggtctcctctttacaaggggcggtattgactaaacagcagcaaatgatgagcaaatttattgctgtcactgatggctcttttaaattgacgattaacggtaaagaaacggtatacagcggcgtcgatttgagtaaagaagccaatcttaatggtgtggcccaacggatagcagataagttaaaagattgttcagtcgcatatgatagttcttcctcgcgtttcgctattatgccgaattctgtcgatgcggttggctatgtttcaccggcaacgacgggaacttatattggtgatttattaaagctggacgaaatatcgggtgctaccgctatcgaatctaccaaagcagaaaccattgctgaggcggtggcggcactgggatcggtatccagtggctggtatgggttggttatcgctgatgactctctgacggataaagatattctctctgttgctgattacattgaatccgcatctgttccccgcatctatggacatacagcgcaaaaagcagatgtcttggatgctgatgttaaaactgatatcggctcaaaattaaaagagagaaactatcaacgcacactttggcaatattcaaccggtaaatcctacacggttgcttctctgctgggccgtatgtttaccgtcaatttcaacggcaataacaccaccatcaccttgaaatttaaacaggaacccgcggtaaccgcagaaaacctcaccgcaacgcaagccaatgtgttgaaaaggatgaatggcaacgtttttgttaaatacagcaatgatacggccattattcaggagggtgtcatggtgaatggggactttattgatgagcgccacggtctggattggttgcagaactacgttcagaacaatctttataacctgctttacaccagtaccagcaagatcccacagactgatgaaggtgtcacacgattaatcaccaatgttgaacagtcactggcgcaagcggcgacaaatggattaatcgctcatggtgtatggggtggcgatccgattggtgcgttggatacgggggcaacattaactaaaggttactacgtttacgcaccgccaattgcgacacaggcacaggctgatagagaagcacgaaaagcaccggttattcagtgtgcaatcaaattagccggtgctgtccactacgctgatgtcattattaatgtaaacagataa

SEQ ID NO: 10775 - DNA, 441 bp, Photorhabdus luminescens
atggctacatattcttttcttgatgtttccgcttctattaccggagttggcggctcttttgatcttggtaacggtgccgcgctctctgatgagggaattaccgtcaccatgtcggagagtaaaaacaccatgaccaccggtgcagacggagaagtcatgcattcattgcatgcaaccaagtctggaactatcaccgttaatttacttaagacgagcccggtaaacgctaaattgaacgcgatgctcagcacacaatcgctttcatcggcggcatggggtaataacgtgattgttattcgcaataaacaaagtaatgacattgctgttgctcgctctgtcgcctttcagaaacaaccggatttgcagaataacaaagcaggcggtaccgtttcttgggtatttgattgcggaaaaatcgacatcatgttaggcacattctaa

SEQ ID NO: 10776 - DNA, 417 bp, Photorhabdus luminescens
gtgatcatggaatttgaaattgatggcaaaaaatatcgcagtggtaaattgaacgcttttcagcaacaagatttagcggtggctttggctccggctattccggcacttggaccgctgatgaaaaagattgtgacaactaaaagtgatgatggagtgacgggctttgaagaagtgctcccttatttggtggaatccatcaatgcattaggaaaatccaaccgacatgaaattaatgatatttgcttatcagtggtttctcgtgaacagaatggtatctggaaccggatttatgaacctgatggacaggtattgatgttcgatgacatcaacggcttcgaactgttgaaaattgtcggatttattattcgagacgcattgggaaatttttttcccgccccattagagagtgcagtgtaa

SEQ ID NO: 10777 - DNA, 1770 bp, Photorhabdus luminescens
atgagcaatgacgttgaaacaactaaagatttcctgatatcgctgaggtttgatgttgatgaagtggaacagcgtaaatttatggctgttatcaccgaagtcacgtctggcattctcaaaatgagggcggaaattgaaaacgcaacatcagttgtggccagttttatcacccaaatagctgacggattggataagttatacgggaagttgcaagaaacagacgcagtggttgaaaaagttaaatctatcaatgaggaaagcgtccgtcgagcggtgggaggtgtagagagatttctgccgagcattaatgctcaatcccatgatacaaatggtcgccattttaatactgcctccttggtcgcatcaatgaatgagcagttattaaaagcaacaacggattgtgctaatcaaaataccagcatacttgatagtgatgacatatttaatgccattgaggaattagttaaatggttagataaaggagaaatttctgcgaaaggtttattggcgacattgaatgaattatggaaatttacaggaagaaaaattgttctgggtgtattatttgattttaatagtcggttaaatgcattacaggaagaagcaaagaaaaatcacgaaacagtggctgaaacgttgtcacggcggaaaagagagtatgataaaaataaaaaaccacttataacatatgatcaactcgataattggatgtcaacacatgggatttatcttgcttctgacttgactccatttttcagtaaagataaatatgaaaaataccaagaacaaattgatggtaagaaaacgataatccacaaacaatatagccaaaaagttgctgatatttccagtaaagtatcagaacgatcaagtaaaacgaaaaagaagcgcaagactaagcgattaaataaagatcatcttaagactggtattgttgaacatcacgatgcgcctaaggaattaaatactccagttaatcaaccaacgaatatttttaatagtgagcttacagcagcaaagctaaaaaaattaaaatcttcgcgaggagtgcggaataacaatccattaaatatgaactttgtacatcagaccggggcggtgcttgaagataacccaaagcccagatttgctcagtatccagatgcttatagtggattaagagctactgctcatcagttgacgcgttattttcgtggtaaaactacaggaaaaaagctacagactattgcaagtattgtcccgacatgggcaccaaagaaagatcataataaaaccaaacagtatattgccaacgtgtctaaaatgatgggagtttctaaggatacgttccttgatctcactgatcctgatgtgatgcaacggctgattgatagcatgatgatagaggaaagtggtggtaatccctattcaccagaatttatcaggaaggcgattatggcagagctacagccagcgaataaagcgccaaagcaggctggacatttaaatcatgtagctcactctttgcagaatatttccattgatcaccgaatgatcaacggcgcggtaaccaatatcaacggtatgatgaatcatcagggattgactccctttttattacatcgtgcgccaatatctgccggcaataatataccgggaataggagaggtcaattatcatattgaagtcaacggtgttgaatcccccagagaagcagcaagactgactggagaaacggtagaacgtactcacagtatgctgcttcgaaatatgcaaacacaggtgaaataa

SEQ ID NO: 10778 - DNA, 306 bp, Photorhabdus luminescens
atggctagggttgtagaaattcctttatcacctcaaaatcagcaattcgatattcagctcaatggcattaactataaaatgagattaatgtggcgtgatatcgcgggttggattttggatattatgacgccggacagtgaatttatcgttacaggtttgccgttggtttttgggattgacttactggaacaatatcgtcatcttggttttaacggctcattaattttttatggtgatataaatcaggagaaacctttcaggaataatcttggtaaagaggacaggttatactttgtaataagttaa

SEQ ID NO: 10779 - DNA, 957 bp, Photorhabdus luminescens
atgtcaaaacaatggataagagaatgccaccttatcgttgtagacaaagatggcgaaaaagtaaatttatcagacctgaaaatcacatttaacattagcagaacggaatcttccaatcctgctagcggtatttttactctatataacctgaataacgaaaccagtaataaattacgtaaaaatgaatttaaaaagattaaatttgtggcgggttacaaggagaactcaggacaaatattctcaggccaaattcagtacacgtatgtaaaaagagacaacgcaacggatacttgtgttgtgattcatgcagcggacggggatgaagcacacaattacgcgaccgttaataccaccattgcggctggatattcgcaagcagatttagatcatttgctaatgcgtgatattgccaaatatggcattaccgccggtctacgccctgaattcagtaaatcagcatcacccaggggaaaagtactttttggcatgcaccgcaatgaagtttctaatttggcaaaacaatgtgatgctaattggcgctatgaagataacaaactacacattgtacccaaaaataaatacttaactgaagccattgtccttacatcaaaaacaggccttattggtatgcctgaacaaactattggctccggtattaacgttacatgcttaattaatccgaatatccgccccgggacattaatccgactggataaccgctcaatcaaaccagttgatccggcgactaaacaagctgctcagtctggcgatcataaggatgcaaaagcacaaccggcaacgttggacgctgatggtgattacattgtcttcaatgtggagtactccggcgatacccgcgaaacggagtggtacatggcaataatgtgtatcgccaagagcgatcatactttgctgaatcaatcaactcacaataaggataaggcagagagcgaatga

SEQ ID NO: 10780 - DNA, 756 bp, Photorhabdus luminescens
atgataaatactgacgaacgactcaatagacccgaagcggtcttttttgctatgcaagaagtcattagcgccggattgtatgtctccttgccttgcattattcaatcatttaatgctgatgcggtaaccatcaccgcgcaaccggccatcagatggaaaatcaggcaaagagacggggaactggaatcggtatccttgccactattagtggatgtgccggttatattcccaaggggaggtggcgtgacattaaccttcccggtaagagccggtgatgaatgcttagtcgtatttgctgatcgttgcatcgattattggtggcaatctggcggtgtacaagagccggtggaccccaggcagcataacctgtctgatggatttgcgcttattggcccgcaatctcagcaacaaaaaatagcgaatatcagcactcacaccgcgcaactgagaagtgatgatggcgcggcgtatattgaacttgatcccagcagccataacgtcacgattatcacaccggcaaaacttatcgcgacagccaatggcggtactgaaatcacgtcacctgacatcatcctgaatggcaacgtcaccattaacggcaacttatcacagggcatgggcgctggtggtggcaccgcaaccctgcaaggcccggtcacggtgagtcatgatgtgacagcggcagggattagccttaaaaaccatgtacatagtggtgtgcaatcaggtggcggtaagacggggaaacctcaatga

SEQ ID NO: 10781 - DNA, 255 bp, Photorhabdus luminescens
gtgaaaacgcgcctgatgttgcgcagtggcgaatggtttcttgataaccgagagggaacagattacgacgacgtgttgggtaaaggcacatcgagtttttatgacctgattattagacagcgaatactgcaaacgccgggtgtagagaacattacccaataccgtagtgaaagaaacccagaaacaagaaaaatcaccattacagccacgatagacacgatttatggacagacaggagtaactgctgatgtatga

SEQ ID NO: 10782 - DNA, 1194 bp, Photorhabdus luminescens
atgtatgaaagtattatcaacaccatgttacctgctattgataaaaacgggatcaatgctcctgattatcaaaccatcttgaatagctggaagacgatattcagggatatttatggggacgatatttacattgaatctgacagtaaagacggtgtttttttatcgctgatagcatacgttattcacggttgtaacaacgcaaccattgcttcctataactcatttagcccgacaacggcggtgggcgaagggctttcccgtaatgtcaaaatcaacggcatcaccagaaaaagctccagtaactcaacggtggatgttttggtcactggtcgagcgggcacagttatccgcaacgcttccgtccgggatgatgcgggaaacgcttggtcactaccggatgaagtgattatagatacacacgggcaggctattgtgaccgcgatttgtcaaaaagcgggcgcgatcggcgcattgccccacacggttaatcaaattgctacgccaacattgggctggcaaaccgtgacgaacccggttgcggctacacttggtcggggaattgaaaccgatgtagaactgcgaatacggcaagaggtttccgttgcgctgccttcgagaaccattatagatggactgatgggggccattgccaacctgcatggagtttcacgttaccggggatatgacaacgactcggacaaaacggatgagaatggcatacctgcccacagcatatcgcttgtcattgatggtggagactcgaaagagattgcccggactatcctggtgaagaaaacgccgggcataccgacatttggcaccacctctgaaacgattaccgatgattatggcaataaaaaaacgataaacttctatcgccctacactggtgccaatttacgttgaaatacacataaaaccctttatcggatatacatcagatattggcaataatattcgtaatgaaatatctaactatataaaatccctttatattggagatggagtatatgtgactcgtttatttgtaccggcaaacttatgcaataaaaacggtggacagacatatgaagtattatctgtgatagtgggaaaatcagcatcgacaaccggaacggcgaacattgacatagcatttaatgaagcgccgacgtgctcacctgaaaatattaaaatagtaacggtgcttgaatga

SEQ ID NO: 10783 - DNA, 501 bp, Photorhabdus luminescens
gtgactgatattttcaaccagaatgcgctgacaacagatttactgattagccgttttgaccttgataaagcggtgggcaaacagcttgacattattggagaatgggtaggaagaaatcgaatgatccaaactccaattgaatcctattacttctcctttgatattactgacttaggatttgatagtggtcaatggaaagggcggtttgacagtgataaaagttatatcaaactggatgatgataattatcgggttgtcattaaagctaaaataggcgcaaataactgggatggaacggctgagtcatttaataacatcctgagttttattcattcaaataatggcctatcggtatcttttgaagataacttggatatgtcattcacagtaacgattaaaggaaaatcaatcagtacaattactaaagaaatcatccatcagggttatctctcgcttaaacctatggggataacggttaattaccatatagtggagggttag

SEQ ID NO: 10784 - DNA, 1107 bp, Photorhabdus luminescens
  misc_feature (1092)..(1092): n is a, c, g, or t
atggctaaaaatgattttaaagcatttgccattggtgaaaacgcgaatactttgtcacaagaagaatatgaaagttcagattttattggggagggttttaaatcgggaatagcgaggagtgagcgattaaataaagtttggcgccaatcttcggttattgctgcggtgatagggaaatatattgcagaaaaaaccggtgaagacgttatggatgatggtgatctggagaaactcgtagcgcaattggatttagcattaaaacataaaattactacagaaatccctgctgcttcactgacacaaaaggggatatcgcaactcaacagtgcgacaaattctgacagagaagaccaagctgcgacgccgaaagcggttcacgatgttagaaaaatcgctgagagcaaattgagtggtgtttctgatgcctcattgactcagaaagggattgtacaactgagtagtgcgacaaatagcacaaatgaaaccttagctgcgacgccaaaggcggttaagggggcatacgattttgcaaatacagcaaatgtagcggctaaaaatgctcatgatgaagcgaacagggctacagataatgctaacagcagattggcgaaaaaccaaaatggcgcagatatccctaataaaagtgagtttataaaaaaccttggtttaacagaaaccgtcaatctggcgaaaaattcagcgcaacaaagctttgttgatgctaattttgcacgtggaaatgttgaaattgttaatactaagagcatatatccgcgaatcaatttcttcccaccattgggtaaagaatctcgtggattctttgcgattgaagcagatctgacaaatgataatacgcaatctatttatttatataagaggaatgtcgcgggtaataatatttatctcattaattttcctaataaaagcggtatattagcgacaattgatgatataactgcgccagtcggcgtcccacttccgtatccatcccgttatacacccgcaggctatcttacgtgtaatggtcaagcatttgataaatctagatacccccaactagccatagcttatccgtcaggaatactgccaganttacgcggtgaattt
